(19) United States
(12) Patent Application Publication
(10) Pub. No.: US 2021/0189342 A1
(43) Pub. Date: Jun. 24, 2021

(54) COMPOSITIONS AND METHODS FOR MODULATING MONOCYTE AND MACROPHAGE INFLAMMATORY PHENOTYPES AND IMMUNOTHERAPY USES THEREOF

(71) Applicant: Verseau Therapeutics, Inc., Bedford, MA (US)

(72) Inventors: Tatiana I. Novobrantseva, Wellesley, MA (US); Igor Feldman, Waltham, MA (US)

(21) Appl. No.: 17/252,379

(22) PCT Filed: Jun. 28, 2019
(86) PCT No.: PCT/US19/39773

§ 371 Date: Dec. 15, 2020

Related U.S. Application Data
(60) Provisional application No. 62/867,532, filed on Jun. 27, 2019.
(60) Provisional application No. 62/857,199, filed on Jun. 4, 2019.
(60) Provisional application No. 62/810,683, filed on Feb. 26, 2019.
(60) Provisional application No. 62/692,463, filed on Jun. 29, 2018.

(51) Int. Cl. C12N 5/0786; C12N 15/113; C07K 16/28; A61K 35/15; G01N 33/50; G01N 33/574; A61K 45/06; A61K 31/495; A61K 9/51

(52) U.S. Cl. CPC C12N 5/0645; C12N 15/113; C07K 16/2818; A61K 35/15; G01N 33/5005; G01N 33/574; C12N 2310/315; G01N 33/5055; G01N 33/5011; A61K 31/495; A61K 9/5123; C12N 2310/14; A61K 45/06

(57) ABSTRACT

The present invention is based, in part, on the identification of compositions and methods for modulating monocyte and macrophage inflammatory phenotypes and immunotherapy uses thereof.

### CROSS-REFERENCE TO RELATED APPLICATIONS

[0001] This application claims the benefit of U.S. Provisional Application No. 62/692,463 filed on 29 Jun. 2018, U.S. Provisional Application No. 62/810,683 filed on 26 Feb. 2019, U.S. Provisional Application No. 62/857,199 filed on 4 Jun. 2019, and U.S. Provisional Application No. 62/867,532 filed on 27 Jun. 2019; the entire contents of each of said applications is incorporated herein in their entirety by this reference.

### BACKGROUND OF THE INVENTION

[0002] Monocytes and macrophages are types of phagocytes, which are cells that protect the body by ingesting harmful foreign particles, bacteria, and dead or dying cells. In addition to monocytes and macrophages, phagocytes include neutrophils, dendritic cells, and mast cells.

[0003] Macrophages are classically known as large white blood cells that patrol the body and engulf and digest cellular debris, and foreign substances, such as pathogens, microbes, and cancer cells, through a process known as phagocytosis. In addition, macrophages, including tissue macrophages and circulating monocyte-derived macrophages, are important mediators of both the innate and adaptive immune system.

[0004] Macrophage phenotype is dependent on activation via a classical or an alternative pathway (see, e.g., Classen et al. (2009) Methods Mol. Biol. 531:29-43). Classically activated macrophages are activated by interferon gamma (IFNγ) or lipopolysaccharide (LPS) and display an M1 phenotype. This pro-inflammatory phenotype is associated with increased inflammation and stimulation of the immune system. Alternatively activated macrophages are activated by cytokines like IL-4, IL-10, and IL-13, and display an M2 phenotype. This anti-inflammatory phenotype is associated with decreased immune response, increased wound healing, increased tissue repair, and embryonic development.

[0005] Under non-pathological conditions, a balanced population of immune-stimulatory and immune-regulatory macrophages exists in the immune system. Perturbation of the balance can result in a variety of disease conditions. In some cancers, for example, tumors secrete immune factors (e.g., cytokines and interleukins) that polarize macrophage populations in favor of the anti-inflammatory, pro-tumorigenic M2 phenotype, which activates wound-healing pathways, promotes the growth of new blood vessels (i.e., angiogenesis), and provides nutrients and growth signals to the tumor. These M2 macrophages are referred to as tumor associated macrophages (TAMs), or tumor infiltrating macrophages. TAMs in the tumor microenvironment are important regulators of cancer progression and metastasis (Pollard (2004) Nat. Rev. Cancer 4:71-78). Small molecules and monoclonal antibodies designed to inhibit macrophage gene targets (e.g., CSF1R and CCR2) have been investigated as modulators of macrophage phenotypes, such as by modulating the balance of pro-tumorigenic macrophages (e.g., TAMs) and pro-inflammatory macrophages that can inhibit tumorigenesis. Therapies that modulate the recruitment, polarization, activation, and/or function of monocytes and macrophages in order to modulate the balance of macrophage populations are referred to as macrophage immunotherapies. Despite advances in the field of macrophage biology, however, there remains a need for new targets (e.g. genes and/or gene products) for modulating the inflammatory phenotype of macrophages and agents for use in macrophage immunotherapy.

### SUMMARY OF THE INVENTION

[0006] The present invention is based, at least in part, on the discovery that the inflammatory phenotype of monocytes and/or macrophages can be regulated by modulating the copy number, amount, and/or activity of one or more biomarkers described herein (e.g., targets listed in Table 1, Table 2, Examples, etc.) and uses of the biomarkers and/or modulatory agents thereof for treating, diagnosing, prognosing, and screening purposes.

[0007] For example, in one aspect, a method of generating monocytes and/or macrophages having an increased inflammatory phenotype after contact with at least one agent comprising contacting monocytes and/or macrophages with an effective amount of the at least one agent, wherein the at least one agent is a) an agent that downregulates the copy number, amount, and/or activity of at least one target listed in Table 1 and/or b) an agent that upregulates the copy number, amount, and/or activity of at least one target listed in Table 2, is provided.

[0008] Numerous embodiments are further provided that can be applied to any aspect of the present invention and/or combined with any other embodiment described herein. For example, in one embodiment, the monocytes and/or macrophages having an increased inflammatory phenotype exhibit one or more of the following after contact with the agent or agents: a) increased expression and/or secretion of cluster of differentiation 80 (CD80), CD86, MHCII, MHCI, interleukin 1-beta (IL-1β), IL-6, CCL3, CCL4, CXCL10, CXCL9, GM-CSF and/or tumor necrosis factor alpha (TNF-α); b) decreased expression and/or secretion of CD206, CD163, CD16, CD53, VSIG4, PSGL-1, TGFb and/or IL-10; c) increased secretion of at least one cytokine or chemokine selected from the group consisting of IL-1β, TNF-α, IL-12, IL-18, GM-CSF, CCL3, CCL4, and IL-23; d) increased ratio of expression of IL-IP, IL-6, and/or TNF-α to expression of IL-10; e) increased CD8+ cytotoxic T cell activation; f) increased recruitment of CD8+ cytotoxic T cell activation; g) increased CD4+ helper T cell activity; h) increased recruitment of CD4+ helper T cell activity; i) increased NK cell activity; j) increased recruitment of NK cell; k) increased neutrophil activity; l) increased macrophage activity; and/or m) increased spindle-shaped morphology, flatness of appearance, and/or number of dendrites, as assessed by microscopy. In another embodiment, the monocytes and/or macrophages contacted with the agent or agents are comprised within a population of cells and the agent increase the number of Type 1 and/or M1 macrophages, and/or decrease the number of Type 2 and/or M2 macrophages, in the population of cells. In still another embodiment, the monocytes and/or macrophages contacted with the agent or agents are comprised within a population of cells and the agent or agents increases the ratio of i) to ii), wherein i) is Type 1 and/or M1 macrophages and ii) is Type 2 and/or M2 macrophages in the population of cells.

[0009] In another aspect, a method of generating monocytes and/or macrophages having a decreased inflammatory phenotype after contact with at least one agent comprising contacting monocytes and/or macrophages with an effective amount of the at least one agent, wherein the agent is a) an agent that upregulates the copy number, amount, and/or activity of at least one target listed in Table 1 and/or b) an agent that downregulates the copy number, amount, and/or activity of at least one target listed in Table 2, is provided.

[0010] As described above, numerous embodiments are further provided that can be applied to any aspect of the present invention and/or combined with any other embodiment described herein. For example, in one embodiment, the monocytes and/or macrophages having the decreased inflammatory phenotype exhibit one or more of the following after contact with the agent or agents: a) decreased expression and/or secretion of cluster of differentiation 80 (CD80), CD86, MHCII, MHCI, interleukin 1-beta (IL-1β), IL-6, CCL3, CCL4, CXCL 10, CXCL9, GM-CSF and/or tumor necrosis factor alpha (TNF-α); b) increased expression and/or secretion of CD206, CD163, CD16, CD53, VSIG4, PSGL-1 and/or IL-10; c) decreased secretion of at least one cytokine selected from the group consisting of IL-1β, TNF-α, IL-12, IL-18, and IL-23; d) decreased ratio of expression of IL-1β, IL-6, and/or TNF-α to expression of IL-10; e) decreased CD8+ cytotoxic T cell activation; f) decreased CD4+ helper T cell activity; g) decreased NK cell activity; h) decreased pro-inflammatory neutrophil activity; i) decreased macrophage activity; and/or j) decreased spindle-shaped morphology, flatness of appearance, and/or number of dendrites, as assessed by microscopy. In another embodiment, the monocytes and/or macrophages contacted with the agent or agents are comprised within a population of cells and the agent decrease the number of Type 1 and/or M1 macrophages, and/or increase the number of Type 2 and/or M2 macrophages, in the population of cells. In still another embodiment, the monocytes and/or macrophages contacted with the agent or agents are comprised within a population of cells and the agent or agents decrease the ratio of i) to ii), wherein i) is Type 1 and/or M1 macrophages and ii) is Type 2 and/or M2 macrophages in the population of cells. In yet another embodiment, the agent or agents that downregulate the copy number, amount, and/or activity of at least one target listed in Table 1 and/or Table 2 is a small molecule inhibitor, CRISPR guide RNA (gRNA), RNA interfering agent, antisense oligonucleotide, single-stranded nucleic acid, double-stranded nucleic acid, aptamer, ribozyme, DNAzyme, peptide, peptidomimetic, antibody, intrabody, or cells. The RNA interfering agent may comprise or be, e.g., a small interfering RNA (siRNA), a small hairpin RNA (shRNA), microRNA (miRNA), or a piwi-interacting RNA (piRNA). In another embodiment, the agent or agents that downregulate the copy number, amount, and/or activity of at least one target listed in Table 1 and/or Table 2 comprises an antibody and/or intrabody, or an antigen binding fragment thereof, which specifically binds to the at least one target listed in Table 1 and/or Table 2. In still another embodiment, the antibody and/or intrabody, or antigen binding fragment thereof, is camelid, murine, chimeric, humanized, human, detectably labeled, comprises an effector domain, comprises an Fc domain, and/or is selected from the group consisting of Fv, Fav, F(ab′)2, Fab′, dsFv, scFv, sc(Fv)2, and diabodies fragments. In yet another embodiment, the antibody and/or intrabody, or antigen binding fragment thereof, is conjugated to a cytotoxic agent. In another embodiment, the cytotoxic agent is selected from the group consisting of a chemotherapeutic agent, a biologic agent, a toxin, and a radioactive isotope. In still another embodiment, the agent or agents that upregulate the copy number, amount, and/or activity of at least one target listed in Table 1 and/or Table 2 is a nucleic acid molecule encoding the one or more targets listed in Table 1 and/or Table 2 or fragment thereof, a polypeptide of the one or more targets listed in Table 1 and/or Table 2 or fragment(s) thereof, an activating antibody and/or intrabody that binds to the one or more targets listed in Table 1 and/or Table 2, or a small molecule that binds to the one or more targets listed in Table 1 and/or Table 2. In yet another embodiment, the macrophages comprise Type 1 macrophages, M1 macrophages, Type 2 macrophages, M2 macrophages, M2c macrophages, M2d macrophages, tumor-associated macrophages (TAM), CD11b+ cells, CD14+ cells, and/or CD11b+/CD14+ cells, optionally wherein the cells and/or macrophages express the target. In another embodiment, the monocytes and/or macrophages are contacted in vitro or ex vivo. In still another embodiment, the monocytes and/or macrophages are primary monocytes and/or primary macrophages. In yet another embodiment, the monocytes and/or macrophages are purified and/or cultured prior to contact with the agent or agents. In another embodiment, the monocytes and/or macrophages are contacted in vivo. In still another embodiment, the monocytes and/or macrophages are contacted in vivo by systemic, peritumoral, or intratumoral administration of the agent. In yet another embodiment, the monocytes and/or macrophages are contacted in a tissue microenvironment.

In another embodiment, the method further comprises contacting the monocytes and/or macrophages with at least one immunotherapeutic agent that modulates the inflammatory phenotype, optionally wherein the immunotherapeutic agent comprises an immune checkpoint inhibitor, immune-stimulatory agonist, inflammatory agent, cells, a cancer vaccine, and/or a virus.

[0011] In still another aspect, a composition comprising i) a monocyte and/or macrophage generated according to a method described herein and/or ii) an siRNA for downregulating the amount and/or activity of at least one target listed in Table 1 and/or Table 2, is provided.

[0012] In yet another aspect, a method of increasing an inflammatory phenotype of monocytes and/or macrophages in a subject after contact with at least one agent comprising administering to the subject an effective amount of the at least one agent, wherein the at least one agent is a) an agent that downregulates the copy number, amount, and/or activity of at least one target listed in Table 1 in or on the monocytes and/or macrophages, and/or b) an agent that upregulates the copy number, amount, and/or activity of at least one target listed in Table 2 in or on the monocytes and/or macrophages, is provided.

[0013] As described above, numerous embodiments are further provided that can be applied to any aspect of the present invention and/or combined with any other embodiment described herein. For example, in one embodiment, the monocytes and/or macrophages having the increased inflammatory phenotype exhibit one or more of the following after contact with the agent or agents: a) increased expression and/or secretion of cluster of differentiation 80 (CD80), CD86, MHCII, MHCI, interleukin 1-beta (IL-1β), IL-6, CCL3, CCL4, CXCL10, CXCL9, GM-CSF and/or tumor necrosis factor alpha (TNF-α); b) decreased expression and/or secretion of CD206, CD163, CD16, CD53, VSIG4, PSGL-1 and/or IL-10; c) increased secretion of at least one cytokine selected from the group consisting of IL-1β, TNF-α, IL-12, IL-18, and IL-23; d) increased ratio of expression of IL-1β, IL-6, and/or TNF-α to expression of IL-10; e) increased CD8+ cytotoxic T cell activation; f) increased CD4+ helper T cell activity; g) increased NK cell activity; h) increased neutrophil activity; i) increased macrophage activity; and/or j) increased spindle-shaped morphology, flatness of appearance, and/or number of dendrites, as assessed by microscopy. In another embodiment, the agent or agents increase the number of Type 1 and/or M1 macrophages, decrease the number of Type 2 and/or M2 macrophages, and/or increase the ratio of i) to ii), wherein i) is Type 1 and/or M1 macrophages and ii) is Type 2 and/or M2 macrophages, in the subject. In still another embodiment, the number and/or activity of cytotoxic CD8+ T cells in the subject is increased after administration of the agent or agents. In yet another embodiment, a method of decreasing an inflammatory phenotype of monocytes and/or macrophages in a subject after contact with at least one agent comprises administering to the subject an effective amount of the at least one agent, wherein the at least one agent is a) an agent that upregulates the copy number, amount, and/or activity of at least one target listed in Table 1 in or on the monocytes and/or macrophages, and/or b) an agent that downregulates the copy number, amount, and/or activity of at least one target listed in Table 2 in or on the monocytes and/or macrophages.

[0014] In another embodiment, the monocytes and/or macrophages having the decreased inflammatory phenotype exhibit one or more of the following after contact with the agent or agents: a) decreased expression and/or secretion of cluster of differentiation 80 (CD80), CD86, MHCII, MHCI, interleukin 1-beta (IL-10), IL-6, CCL3, CCL4, CXCL10, CXCL9, GM-CSF and/or tumor necrosis factor alpha (TNF-α); b) increased expression and/or secretion of CD206, CD163, CD16, CD53, VSIG4, PSGL-1 and/or IL-10; c) decreased secretion of at least one cytokine selected from the group consisting of IL-10, TNF-α, IL-12, IL-18, and IL-23; d) decreased ratio of expression of IL-1s, IL-6, and/or TNF-α to expression of IL-10; e) decreased CD8+ cytotoxic T cell activation; f) decreased CD4+ helper T cell activity; g) decreased NK cell activity; h) decreased neutrophil activity; i) decreased macrophage activity; and/or j) decreased spindle-shaped morphology, flatness of appearance, and/or number of dendrites, as assessed by microscopy. In still another embodiment, the agent or agents decrease the number of Type 1 and/or M1 macrophages, increase the number of Type 2 and/or M2 macrophages, and/or decrease the ratio of i) to ii), wherein i) is Type 1 and/or M1 macrophages and ii) is Type 2 and/or M2 macrophages, in the subject. In yet another embodiment, the number and/or activity of cytotoxic CD8+ T cells in the subject is decreased after administration of the agent. In another embodiment, the agent that downregulates the copy number, amount, and/or activity of at least one target listed in Table 1 and/or Table 2 is a small molecule inhibitor, CRISPR guide RNA (gRNA), RNA interfering agent, antisense oligonucleotide, peptide or peptidomimetic inhibitor, aptamer, antibody, intrabody, or cells. The RNA interfering agent may comprise or be, e.g., a small interfering RNA (siRNA), a small hairpin RNA (shRNA), microRNA (miRNA), or a piwi-interacting RNA (piRNA). In still another embodiment, the agent that downregulates the copy number, amount, and/or activity of at least one target listed in Table 1 and/or Table 2 comprises an antibody and/or intrabody, or an antigen binding fragment thereof, which specifically binds to the at least one target listed in Table 1 and/or Table 2. In yet another embodiment, the antibody and/or intrabody, or antigen binding fragment thereof, is camelid, murine, chimeric, humanized, human, detectably labeled, comprises an effector domain, comprises an Fc domain, and/or is selected from the group consisting of Fv, Fav, F(ab′)2, Fab′, dsFv, scFv, sc(Fv)2, and diabodies fragments. In another embodiment, the antibody and/or intrabody, or antigen binding fragment thereof, is conjugated to a cytotoxic agent. In still another embodiment, the cytotoxic agent is selected from the group consisting of a chemotherapeutic agent, a biologic agent, a toxin, and a radioactive isotope. In yet another embodiment, the agent that upregulates the copy number, amount, and/or activity of at least one target listed in Table 1 and/or Table 2 is a nucleic acid molecule encoding the one or more targets listed in Table 1 and/or Table 2 or fragment thereof, a polypeptide of the one or more targets listed in Table 1 and/or Table 2 or fragment(s) thereof, an activating antibody and/or intrabody that binds to the one or more targets listed in Table 1 and/or Table 2, or a small molecule that binds to the one or more targets listed in Table 1 and/or Table 2. In another embodiment, the macrophages comprise Type 1 macrophages, M1 macrophages, Type 2 macrophages, M2 macrophages, M2c macrophages, M2d macrophages, tumor-associated macrophages (TAM), CD11b+ cells, CD14+ cells, and/or CD11b+/CD14+ cells, optionally wherein the cells and/or macrophages express the target. In still another embodiment, the agent or agents are administered in vivo by systemic, peritumoral, or intratumoral administration of the agent. In yet another embodiment, the agent or agents contact the monocytes and/or macrophages in a tissue microenvironment. In another embodiment, the method further comprises contacting the monocytes and/or macrophages with at least one immunotherapeutic agent that modulates the inflammatory phenotype, optionally wherein the immunotherapeutic agent comprises an immune checkpoint inhibitor, immune-stimulatory agonist, inflammatory agent, cells, a cancer vaccine, and/or a virus.

[0015] In another aspect, a method of increasing inflammation in a subject comprising administering to the subject an effective amount of a) monocytes and/or macrophages contacted with at least one agent to downregulate the copy number, amount, and/or activity of at least one target listed in Table 1 and/or b) monocytes and/or macrophages contacted with at least one agent to upregulate the copy number, amount, and/or activity of at least one target listed in Table 2, is provided.

[0016] As described above, numerous embodiments are further provided that can be applied to any aspect of the present invention and/or combined with any other embodiment described herein. For example, in one embodiment, the macrophages comprise Type 1 macrophages, M1 macrophages, Type 2 macrophages, M2 macrophages, M2c macrophages, M2d macrophages, tumor-associated macrophages (TAM), CD11b+ cells, CD14+ cells, and/or CD11b+/CD14+ cells, optionally wherein the cells and/or macrophages express the target. In another embodiment, the monocytes and/or macrophages are genetically engineered, autologous, syngeneic, or allogeneic relative to the subject's monocytes and/or macrophages. In still another embodiment, the monocytes and/or macrophages contacted with the at least one agent of a) are different from the monocytes and/or macrophages contacted with the at least one agent of b). In yet another embodiment, the monocytes and/or macrophages contacted with the at least one agent of a) are the same as the monocytes and/or macrophages contacted with the at least one agent of b). In another embodiment, the agent or agents are administered systemically, peritumorally, or intratumorally.

[0017] In still another aspect, a method of decreasing inflammation in a subject comprising administering to the subject an effective amount of a) monocytes and/or macrophages contacted with at least one agent to upregulate the copy number, amount, and/or activity of at least one target listed in Table 1 and/or b) monocytes and/or macrophages contacted with at least one agent to downregulate the copy number, amount, and/or activity of at least one target listed in Table 2, is provided.

[0018] As described above, numerous embodiments are further provided that can be applied to any aspect of the present invention and/or combined with any other embodiment described herein. For example, in one embodiment, the macrophages comprise Type 1 macrophages, M1 macrophages, Type 2 macrophages, M2 macrophages, M2c macrophages, M2d macrophages, tumor-associated macrophages (TAM), CD11b+ cells, CD14+ cells, and/or CD11b+/CD14+ cells, optionally wherein the cells and/or macrophages express the target. In another embodiment, the monocytes and/or macrophages are genetically engineered, autologous, syngeneic, or allogeneic relative to the subject's monocytes and/or macrophages. In still another embodiment, the monocytes and/or macrophages contacted with the at least one agent of a) are different from the monocytes and/or macrophages contacted with the at least one agent of b). In yet another embodiment, the monocytes and/or macrophages contacted with the at least one agent of a) are the same as the monocytes and/or macrophages contacted with the at least one agent of b). In another embodiment, the agent or agents are administered systemically, peritumorally, or intratumorally.

[0019] In yet another aspect, a method of sensitizing cancer cells in a subject to cytotoxic CD8+ T cell-mediated killing and/or immune checkpoint therapy comprising administering to the subject a therapeutically effective amount of a) at least one agent that downregulates the copy number, amount, and/or activity of at least one target listed in Table 1 in or on monocytes and/or macrophages and/or b) at least one agent that upregulates the copy number, amount, and/or activity of at least one target listed in Table 2 in or on monocytes and/or macrophage, is provided.

[0020] As described above, numerous embodiments are further provided that can be applied to any aspect of the present invention and/or combined with any other embodiment described herein. For example, in one embodiment, the method further comprises administering at least one agent that downregulates the copy number, amount, and/or activity of at least one target listed in Table 1. In another embodiment, the agent is a small molecule inhibitor, CRISPR guide RNA (gRNA), RNA interfering agent, antisense oligonucleotide, peptide or peptidomimetic inhibitor, aptamer, antibody, intrabody, or cells. The RNA interfering agent may comprise or be, e.g., a small interfering RNA (siRNA), a small hairpin RNA (shRNA), microRNA (miRNA), or a piwi-interacting RNA (piRNA). In still another embodiment, the agent comprises an antibody and/or intrabody, or an antigen binding fragment thereof, which specifically binds to the at least one target listed in Table 1. In yet another embodiment, the antibody and/or intrabody, or antigen binding fragment thereof, is camelid, murine, chimeric, humanized, human, detectably labeled, comprises an effector domain, comprises an Fc domain, and/or is selected from the group consisting of Fv, Fav, F(ab′)2, Fab′, dsFv, scFv, sc(Fv)2, and diabodies fragments. In another embodiment, the antibody and/or intrabody, or antigen binding fragment thereof, is conjugated to a cytotoxic agent. In still another embodiment, the cytotoxic agent is selected from the group consisting of a chemotherapeutic agent, a biologic agent, a toxin, and a radioactive isotope. In yet another embodiment, the method further comprises administering at least one agent that upregulates the copy number, amount, and/or activity of at least one target listed in Table 2. In another embodiment, the agent is a nucleic acid molecule encoding the one or more targets listed in Table 2 or fragment thereof, a polypeptide of the one or more targets listed in Table 2 or fragment(s) thereof, an activating antibody and/or intrabody that binds to the one or more targets listed in Table 2, or a small molecule that binds to the one or more targets listed in Table 2.

[0021] In another aspect, a method of sensitizing cancer cells in a subject afflicted with a cancer to cytotoxic CD8+ T cell-mediated killing and/or immune checkpoint therapy comprising administering to the subject a therapeutically effective amount of a) monocyte cells and/or macrophage cells contacted with at least one agent to downregulate the copy number, amount, and/or activity of at least one target listed in Table 1 and/or b) monocyte cells and/or macrophage cells contacted with at least one agent to upregulate the copy number, amount, and/or activity of at least one target listed in Table 2, is provided.

[0022] As described above, numerous embodiments are further provided that can be applied to any aspect of the present invention and/or combined with any other embodiment described herein. For example, in one embodiment, the macrophages comprise Type 1 macrophages, M1 macrophages, Type 2 macrophages, M2 macrophages, M2c macrophages, M2d macrophages, tumor-associated macrophages (TAM), CD11b+ cells, CD14+ cells, and/or CD11b+/CD14+ cells, optionally wherein the cells and/or macrophages express the target. In another embodiment, the monocytes and/or macrophages are genetically engineered, autologous, syngeneic, or allogeneic relative to the subject's monocytes and/or macrophages. In still another embodiment, the monocytes and/or macrophages contacted with the at least one agent of a) are different from the monocytes and/or macrophages contacted with the at least one agent of b). In yet another embodiment, the monocytes and/or macrophages contacted with the at least one agent of a) are the same as the monocytes and/or macrophages contacted with the at least one agent of b). In another embodiment, the agent or agents are administered systemically, peritumorally, or intratumorally. In still another embodiment, the method further comprises treating the cancer in the subject by administering to the subject at least one immunotherapy, optionally wherein the immunotherapy comprises an immune checkpoint inhibitor, immune-stimulatory agonist, inflammatory agent, cells, a cancer vaccine, and/or a virus. In yet another embodiment, the immune checkpoint is selected from the group consisting of PD-1, PD-L1, PD-L2, and CTLA-4. In another embodiment, the immune checkpoint is PD-1. In still another embodiment, the agent or agents reduce the number of proliferating cells in the cancer and/or reduce the volume or size of a tumor comprising the cancer cells. In yet another embodiment, the agent or agents increase the amount and/or activity of CD8+ T cells infiltrating a tumor comprising the cancer cells. In still another embodiment, the agent or agents a) increase the amount and/or activity of M1 macrophages infiltrating a tumor comprising the cancer cells and/or b) decrease the amount and/or activity of M2 macrophages infiltrating a tumor comprising the cancer cells. In yet another embodiment, the method further comprises administering to the subject at least one additional therapy or regimen for treating the cancer. In another embodiment, the therapy is administered before, concurrently with, or after the agent.

[0023] In still another aspect, a method of identifying monocytes and/or macrophages that can increase an inflammatory phenotype thereof by modulating at least one target comprising: a) determining the copy number, amount, and/or activity of at least one target listed in Table 1 and/or Table 2 from the monocytes and/or macrophages; b) determining the copy number, amount, and/or activity of the at least one target in a control; and c) comparing the copy number, amount, and/or activity of the at least one target detected in steps a) and b); wherein the presence of, or an increase in, the copy number, amount, and/or activity of, the at least one target listed in Table 1 and/or the absence of, or a decrease in, the copy number, amount, and/or activity of, the at least one target listed in Table 2, in the monocytes and/or macrophages relative to the control copy number, amount, and/or activity of the at least one target indicates that the monocytes and/or macrophages can increase the inflammatory phenotype thereof by modulating the at least one target, is provided.

[0024] As described above, numerous embodiments are further provided that can be applied to any aspect of the present invention and/or combined with any other embodiment described herein. For example, in one embodiment, the method further comprises contacting the cells with, recommending, prescribing, or administering an agent that modulates the at least one target listed in Table 1 and/or Table 2. In another embodiment, the method further comprises contacting the cells with, recommending, prescribing, or administering cancer therapy other than an agent that modulates the one or more targets listed in Table 1 and/or Table 2 if the subject is determined not to benefit from increasing an inflammatory phenotype by modulating the one or more targets. In still another embodiment, the method further comprises contacting the cells with and/or administering at least one additional agent that increases an immune response. In yet another embodiment, the additional agent is selected from the group consisting of targeted therapy, chemotherapy, radiation therapy, and/or hormonal therapy. In another embodiment, the control is from a member of the same species to which the subject belongs. In still another embodiment, the control is a sample comprising cells. In yet another embodiment, the subject is afflicted with a cancer. In another embodiment, the control is a cancer sample from the subject. In still another embodiment, the control is a non-cancer sample from the subject.

[0025] In yet another aspect, a method of identifying monocytes and/or macrophages that can decrease an inflammatory phenotype thereof by modulating at least one target comprising: a) determining the copy number, amount, and/or activity of at least one target listed in Table 1 and/or Table 2 from the monocytes and/or macrophages; b) determining the copy number, amount, and/or activity of the at least one target in a control; and c) comparing the copy number, amount, and/or activity of the at least one target detected in steps a) and b); wherein the absence of, or a decrease in, the copy number, amount, and/or activity of, the at least one target listed in Table 1 and/or the presence of, or an increase in, the copy number, amount, and/or activity of, the at least one target listed in Table 2, in the monocytes and/or macrophages relative to the control copy number, amount, and/or activity of the at least one target indicates that the monocytes and/or macrophages that can decrease the inflammatory phenotype thereof by modulating the at least one target, is provided.

[0026] As described above, numerous embodiments are further provided that can be applied to any aspect of the present invention and/or combined with any other embodiment described herein. For example, in one embodiment, the method further comprises contacting the monocytes and/or macrophages with, recommending, prescribing, or administering an agent or agents that modulate the one or more targets listed in Table 1 and/or Table 2. In another embodiment, the method further comprises contacting the monocytes and/or macrophages with, recommending, prescribing, or administering cancer therapy other than an agent or agents that modulate the one or more targets listed in Table 1 and/or Table 2 if the subject is determined not to benefit from decreasing an inflammatory phenotype by modulating the at least one target. In still another embodiment, the method further comprises contacting the monocytes and/or macrophages with and/or administering at least one additional agent that decreases an immune response. In yet another embodiment, the control is from a member of the same species to which the subject belongs. In another embodiment, the control is a sample comprising cells. In still another embodiment, the subject is afflicted with a cancer. In another embodiment, the control is a cancer sample from the subject. In still another embodiment, the control is a non-cancer sample from the subject.

[0027] In another aspect, a method for predicting the clinical outcome of a subject afflicted with a cancer, the method comprising: a) determining the copy number, amount, and/or activity of at least one target listed in Table 1 and/or Table 2 from monocytes and/or macrophages from the subject; b) determining the copy number, amount, and/or activity of the at least one target from a control having a poor clinical outcome; and c) comparing the copy number, amount, and/or activity of the at least one target in the subject sample and in the sample from the control subject; wherein the presence of, or an increase in, the copy number, amount, and/or activity of, the at least one target listed in Table 1 and/or the absence of, or a decrease in, the copy number, amount, and/or activity of, the at least one target listed in Table 2, from the monocytes and/or macrophages from the subject as compared to the copy number, amount and/or activity in the control, indicates that the subject does not have a poor clinical outcome, is provided.

[0028] In still another aspect, a method for monitoring the inflammatory phenotype of monocytes and/or macrophages in a subject is provided, the method comprising: a) detecting in a first subject sample at a first point in time the copy number, amount, and/or or activity of at least one target listed in Table 1 and/or Table 2 from monocytes and/or macrophages from the subject; b) repeating step a) using a subsequent sample comprising monocytes and/or macrophages obtained at a subsequent point in time; and c) comparing the amount or activity of at least one target listed in Table 1 and/or Table 2 detected in steps a) and b), wherein the absence of, or a decrease in, the copy number, amount, and/or activity of, the at least one target listed in Table 1 and/or the presence of, or an increase in, the copy number, amount, and/or activity of, the at least one target listed in Table 2, from the monocytes and/or macrophages from the subsequent sample as compared to the copy number, amount and/or activity from the monocytes and/or macrophages from the first sample indicates that the subject's monocytes and/or macrophages have an upregulated inflammatory phenotype; or wherein the presence of, or an increase in, the copy number, amount, and/or activity of, the at least one target listed in Table 1 and/or the absence of, or a decrease in, the copy number, amount, and/or activity of, the at least one target listed in Table 2, from the monocytes and/or macrophages from the subsequent sample as compared to the copy number, amount and/or activity from the monocytes and/or macrophages from the first samples indicates that the subject's monocytes and/or macrophages have a downregulated inflammatory phenotype.

[0029] As described above, numerous embodiments are further provided that can be applied to any aspect of the present invention and/or combined with any other embodiment described herein. For example, in one embodiment, the first and/or at least one subsequent sample comprises monocytes and/or macrophages that are cultured in vitro. In another embodiment, the first and/or at least one subsequent sample comprises monocytes and/or macrophages that are not cultured in vitro. In still another embodiment, the first and/or at least one subsequent sample is a portion of a single sample or pooled samples obtained from the subject. In yet another embodiment, the sample comprises blood, serum, peritumoral tissue, and/or intratumoral tissue obtained from the subject.

[0030] In yet another aspect, a method of assessing the efficacy of an agent for increasing an inflammatory phenotype of monocytes and/or macrophages in a subject, comprising: a) detecting in a subject sample comprising monocytes and/or macrophages at a first point in time i) the copy number, amount, and/or or activity of at least one target listed in Table 1 and/or Table 2 in or on the monocytes and/or macrophages and/or ii) an inflammatory phenotype of the monocytes and/or macrophages; b) repeating step a) during at least one subsequent point in time after the monocytes and/or macrophages are contacted with the agent; and c) comparing the value of i) and/or ii) detected in steps a) and b), wherein the absence of, or a decrease in, the copy number, amount, and/or activity of, the at least one target listed in Table 1 and/or the presence of, or an increase in, the copy number, amount, and/or activity of, the at least one target listed in Table 2, and/or an increase in ii) in the subsequent sample as compared to the copy number, amount, and/or activity in the sample at the first point in time, indicates that the agent increases the inflammatory phenotype of monocytes and/or macrophages in the subject, is provided.

[0031] As described above, numerous embodiments are further provided that can be applied to any aspect of the present invention and/or combined with any other embodiment described herein. For example, in one embodiment, the monocytes and/or macrophages contacted with the agent are comprised within a population of cells and the agent increases the number of Type 1 and/or M1 macrophages in the population of cells. In another embodiment, the monocytes and/or macrophages contacted with the agent are comprised within a population of cells and the agent decreases the number of Type 2 and/or M2 macrophages in the population of cells.

[0032] In another aspect, a method of assessing the efficacy of an agent for decreasing an inflammatory phenotype of monocytes and/or macrophages, comprising: a) detecting in a subject sample comprising monocytes and/or macrophages at a first point in time i) the copy number, amount, and/or or activity of at least one target listed in Table 1 and/or Table 2 in or on the monocytes and/or macrophages and/or ii) an inflammatory phenotype of the monocytes and/or macrophages; b) repeating step a) during at least one subsequent point in time after the monocytes and/or macrophages are contacted with the agent; and c) comparing the value of i) and/or ii) detected in steps a) and b), wherein the presence of, or an increase in, the copy number, amount, and/or activity of, the at least one target listed in Table 1 and/or the absence of, or a decrease in, the copy number, amount, and/or activity of, the at least one target listed in Table 2, and/or a decrease in ii) in the subsequent sample as compared to the copy number, amount, and/or activity in the sample at the first point in time, indicates that the agent decreases the inflammatory phenotype of monocytes and/or macrophages in the subject.

[0033] As described above, numerous embodiments are further provided that can be applied to any aspect of the present invention and/or combined with any other embodiment described herein. For example, in one embodiment, the monocytes and/or macrophages contacted with the agent are comprised within a population of cells and the agent selectively decreases the number of Type 1 and/or M1 macrophages in the population of cells. In another embodiment, the monocytes and/or macrophages contacted with the agent are comprised within a population of cells and the agent selectively increases the number of Type 2 and/or M2 macrophages in the population of cells. In still another embodiment, the monocytes and/or macrophages are contacted in vitro or ex vivo. In yet another embodiment, the monocytes and/or macrophages are primary monocytes and/or primary macrophages. In another embodiment, the monocytes and/or macrophages are purified and/or cultured prior to contact with the agent. In still another embodiment, the monocytes and/or macrophages are contacted in vivo. In yet another embodiment, the monocytes and/or macrophages are contacted in vivo by systemic, peritumoral, or intratumoral administration of the agent. In another embodiment, the monocytes and/or macrophages are contacted in a tissue microenvironment. In still another embodiment, the method described herein further comprises contacting the monocytes and/or macrophages with at least one immunotherapeutic agent that modulates the inflammatory phenotype, optionally wherein the immunotherapeutic agent comprises an immune checkpoint inhibitor, immune-stimulatory agonist, inflammatory agent, cells, a cancer vaccine, and/or a virus. In yet another embodiment, the subject is a mammal. In another embodiment, the mammal is a non-human animal model or a human.

[0034] In still another aspect, a method of assessing the efficacy of an agent for treating a cancer in a subject, comprising: a) detecting in a subject sample comprising monocytes and/or macrophages at a first point in time i) the copy number, amount, and/or or activity of at least one target listed in Table 1 and/or Table 2 in or on monocytes and/or macrophages and/or ii) an inflammatory phenotype of the monocytes and/or macrophages; b) repeating step a) during at least one subsequent point in time after administration of the agent; and c) comparing the value of i) and/or ii) detected in steps a) and b), wherein the absence of, or a decrease in, the copy number, amount, and/or activity of, the at least one target listed in Table 1 and/or the presence of, or an increase in, the copy number, amount, and/or activity of, the at least one target listed in Table 2, and/or an increase in ii) in or on the monocytes and/or macrophages of the subject sample at the subsequent point in time as compared to the copy number, amount, and/or activity in or on the monocytes and/or macrophages of the subject sample at the first point in time, indicates that the agent treats the cancer in the subject, is provided.

[0035] As described above, numerous embodiments are further provided that can be applied to any aspect of the present invention and/or combined with any other embodiment described herein. For example, in one embodiment, between the first point in time and the subsequent point in time, the subject has undergone treatment, completed treatment, and/or is in remission for the cancer. In another embodiment, the first and/or at least one subsequent sample is selected from the group consisting of ex vivo and in vivo samples. In still another embodiment, the first and/or at least one subsequent sample is obtained from a non-human animal model of the cancer.

In yet another embodiment, the first and/or at least one subsequent sample is a portion of a single sample or pooled samples obtained from the subject. In another embodiment, the sample comprises cells, serum, peritumoral tissue, and/or intratumoral tissue obtained from the subject.

[0036] In yet another aspect, a method for screening for agents that sensitize cancer cells to cytotoxic T cell-mediated killing and/or immune checkpoint therapy comprising a) contacting cancer cells with cytotoxic T cells and/or immune checkpoint therapy in the presence of monocytes and/or macrophages contacted with i) at least one agent that decreases the copy number, amount, and/or activity of at least one target listed in Table 1 and/or ii) at least one agent that increases the copy number, amount, and/or activity of the at least one target listed in Table 2; b) contacting cancer cells with cytotoxic T cells and/or immune checkpoint therapy in the presence of control monocytes and/or macrophages that are not contacted with the at least one agent or agents; and c) identifying agents that sensitize cancer cells to cytotoxic T cell-mediated killing and/or immune checkpoint therapy by identifying agents that increase cytotoxic T cell-mediated killing and/or immune checkpoint therapy efficacy in a) compared to b), is provided.

[0037] In another aspect, a method for screening for agents that sensitize cancer cells to cytotoxic T cell-mediated killing and/or immune checkpoint therapy comprising a) contacting cancer cells with cytotoxic T cells and/or immune checkpoint therapy in the presence of monocytes and/or macrophages engineered to decrease the copy number, amount, and/or activity of at least one target listed in Table 1 and/or ii) engineered to increase the copy number, amount, and/or activity of the at least one target listed in Table 2; b) contacting cancer cells with cytotoxic T cells and/or immune checkpoint therapy in the presence of control monocytes and/or macrophages; and c) identifying agents that sensitize cancer cells to cytotoxic T cell-mediated killing and/or immune checkpoint therapy by identifying agents that increase cytotoxic T cell-mediated killing and/or immune checkpoint therapy efficacy in a) compared to b), is provided.

[0038] As described above, numerous embodiments are further provided that can be applied to any aspect of the present invention and/or combined with any other embodiment described herein. For example, in one embodiment, the step of contacting occurs in vivo, ex vivo, or in vitro. In another embodiment, the method further comprises determining a reduction in i) the number of proliferating cells in the cancer and/or ii) a reduction in the volume or size of a tumor comprising the cancer cells. In still another embodiment, the method further comprises determining i) an increased number of CD8+ T cells and/or ii) an increased number of Type 1 and/or M1 macrophages infiltrating a tumor comprising the cancer cells. In yet another embodiment, the method further comprises determining responsiveness to the agent that modulates the at least one target listed in Table 1 and/or Table 2 measured by at least one criterion selected from the group consisting of clinical benefit rate, survival until mortality, pathological complete response, semi-quantitative measures of pathologic response, clinical complete remission, clinical partial remission, clinical stable disease, recurrence-free survival, metastasis free survival, disease free survival, circulating tumor cell decrease, circulating marker response, and RECIST criteria. In another embodiment, the method further comprises contacting the cancer cells with at least one additional cancer therapeutic agent or regimen. In still another embodiment, the agent or agents further comprise a lipid or lipidoid. In yet another embodiment, the lipidoid is of Formula (VI):

[chemical structure]

wherein: p is an integer between 1 and 3, inclusive; m is an integer between 1 and 3, inclusive; R_{A} is hydrogen; substituted or unsubstituted, cyclic or acyclic, branched or unbranched C₁₋₂₀ aliphatic; substituted or unsubstituted, cyclic or acyclic, branched or unbranched C₁₋₂₀ heteroaliphatic; substituted or unsubstituted aryl; substituted or unsubstituted heteroaryl;

[chemical structure]

R_{F} is hydrogen; substituted or unsubstituted, cyclic or acyclic, branched or unbranched C₁₋₂₀ aliphatic; substituted or unsubstituted, cyclic or acyclic, branched or unbranched C₁₋₂₀ heteroaliphatic; substituted or unsubstituted aryl; substituted or unsubstituted heteroaryl;

[chemical structure]

each occurrence of R₅ is independently hydrogen; substituted or unsubstituted, cyclic or acyclic, branched or unbranched C₁₋₂₀ aliphatic; substituted or unsubstituted, cyclic or acyclic, branched or unbranched C₁₋₂₀ heteroaliphatic; substituted or unsubstituted aryl; or substituted or unsubstituted heteroaryl;
wherein, at least one of R_{A}, R_{F}, R_{Y}, and R_{Z} is

[chemical structure]

each occurrence of x is an integer between 1 and 10, inclusive; each occurrence of y is an integer between 1 and 10, inclusive; each occurrence of R_{Y} is hydrogen; substituted or unsubstituted, cyclic or acyclic, branched or unbranched C₁₋₂₀ aliphatic; substituted or unsubstituted, cyclic or acyclic, branched or unbranched C₁₋₂₀ heteroaliphatic; substituted or unsubstituted aryl; substituted or unsubstituted heteroaryl; OH or

[chemical structure]

each occurrence of R_{Z} is hydrogen; substituted or unsubstituted, cyclic or acyclic, branched or unbranched C₁₋₂₀ aliphatic; substituted or unsubstituted, cyclic or acyclic, branched or unbranched C₁₋₂₀ heteroaliphatic; substituted or unsubstituted aryl: substituted or unsubstituted heteroaryl,

[chemical structure]

or a pharmaceutically acceptable salt thereof. In another embodiment, p is 1. In still another embodiment, m is 1. In yet another embodiment, each of p and m are 1. In yet another embodiment, R_{F} is

[chemical structure]

In another embodiment, R_{A} is

[chemical structure]

In still another embodiment, the compound of Formula (VI) is of the formula:

[chemical structure]

or a salt thereof. In yet another embodiment, the composition is in the form a lipid nanoparticle. In another embodiment, the lipid nanoparticle comprises about 1.0% to about 60.0% by mole of C12-200. In still another embodiment, the lipid nanoparticle further comprises one or more co-lipids. In yet another embodiment, each co-lipid is selected from disteroylphosphatidyl choline (DSPC), cholesterol, and DMG-PEG. In another embodiment, the concentration of DSPC is about 1.0% to about 20.0% by mole. In still another embodiment, the concentration of cholesterol is about 10.0% to about 50.0% by mole. In yet another embodiment, the concentration of DMG-PEG is about 0.1% to about 5.0% by mole. In another embodiment, DSPC is present a concentration of about 1.0% to about 20.0% by mole; cholesterol is present at a concentration of about 10.0% to about 50.0% by mole; and DMG-PEG is present a concentration of about 0.1% to about 5.0% by mole. In still another embodiment, the agent is in a pharmaceutically acceptable formulation. In yet another embodiment, the monocytes and/or macrophages having a modulated inflammatory phenotype exhibit one or more of the following: a) modulated expression of cluster of differentiation 80 (CD80), CD86, MHCII, MHCI, interleukin 1-beta (IL-1β), IL-6, CCL3, CCL4, CXCL10, CXCL9, GM-CSF and/or tumor necrosis factor alpha (TNF-α); b) modulated expression of CD206, CD163, CD16, CD53, VSIG4, PSGL-1 and/or IL-10; c) modulated secretion of at least one cytokine selected from the group consisting of IL-0, TNF-α, IL-12, IL-18, and IL-23; d) modulated ratio of expression of IL-1β, IL-6, and/or TNF-α to expression of IL-10; e) modulated CD8+ cytotoxic T cell activation; f) modulated CD4+ helper T cell activity; g) modulated NK cell activity; h) modulated neutrophil activity; i) modulated macrophage activity; and/or j) modulated spindle-shaped morphology, flatness of appearance, and/or dendrite numbers, as assessed by microscopy. In another embodiment, the cells and/or macrophages comprise Type 1 macrophages, M1 macrophages, Type 2 macrophages, M2 macrophages, M2c macrophages, M2d macrophages, tumor-associated macrophages (TAM), CD11b+ cells, CD14+ cells, and/or CD11b+/CD14+ cells, optionally wherein the cells and/or macrophages express or are determined to express at least one target selected from the group consisting of targets listed in Table 1 and/or Table 2. In still another embodiment, the at least one target listed in Table 1 is selected from the group consisting of human SIGLEC9, VSIG4, CD74, CD207, LRRC25, SELPLG, AIF1, CD84, IGSF6, CD48, CD33, LST1, TNFAIP8L2 (TIPE2), SPI1 (PU.1), LLRB2, CCR5, EVI2B, CLEC7A, TBXAS1, SIGLEC7, and DOCK2, or a fragment thereof. In yet another embodiment, the at least one target listed in Table 2 is selected from the group consisting of human CD53, FERMT3, CD37, CXorf21, CD48, and CD84, or a fragment thereof. In another embodiment, the cancer is a solid tumor that is infiltrated with macrophages, wherein the infiltrating macrophages represent at least about 5% of the mass, volume, and/or number of cells in the tumor or the tumor microenvironment, and/or wherein the cancer is selected from the group consisting of mesothelioma, kidney renal clear cell carcinoma, glioblastoma, lung adenocarcinoma, lung squamous cell carcinoma, pancreatic adenocarcinoma, breast invasive carcinoma, acute myeloid leukemia, adrenocortical carcinoma, bladder urothelial carcinoma, brain lower grade glioma, breast invasive carcinoma, cervical squamous cell carcinoma and endocervical adenocarcinoma, cholangiocarcinoma, colon adenocarcinoma, esophageal carcinoma, glioblastoma multiforme, head and neck squamous cell carcinoma, kidney chromophobe, kidney renal clear cell carcinoma, kidney renal papillary cell carcinoma, liver hepatocellular carcinoma, lymphoid neoplasm diffuse large B-cell lymphoma, mesothelioma, ovarian serous, cystadenocarcinoma, pheochromocytoma, paraganglioma, prostate adenocarcinoma, rectum adenocarcinoma, sarcoma, skin cutaneous melanoma, stomach adenocarcinoma, testicular germ cell tumors, thymoma, thyroid carcinoma, uterine carcinosarcoma, uterine corpus endometrial carcinoma, and uveal melanoma. In still another embodiment, the macrophages comprise Type 1 macrophages, M1 macrophages, Type 2 macrophages, M2 macrophages, M2c macrophages, M2d macrophages, tumor-associated macrophages (TAM), CD11b+ cells, CD14+ cells, and/or CD11b+/CD14+ cells, optionally wherein the macrophages are TAMs and/or M2 macrophages. In yet another embodiment, the macrophages express or are determined to express one or more targets selected from the group consisting of targets listed in Table 1 and/or Table 2. In another embodiment, the at least one target listed in Table 1 is selected from the group consisting of human SIGLEC9, VSIG4, CD74, CD207, LRRC25, SELPLG, AIF1, CD84, IGSF6, CD48, CD33, LST1, TNFAIP8L2 (TIPE2), SPI1 (PU.1), LILRB2, CCR5, EVI2B, CLEC7A, TBXAS1, SIGLEC7, and DOCK2, or a fragment thereof. In still another embodiment, the at least one target listed in Table 2 is selected from the group consisting of human CD53, FERMT3, CD37, CXorf21, CD48, and CD84, or a fragment thereof. In yet another embodiment, the monocytes and/or macrophages are primary monocytes and/or primary macrophages. In another embodiment, the monocytes and/or macrophages are comprised within a tissue microenvironment. In still another embodiment, the monocytes and/or macrophages are comprised within a human tumor model or an animal model of cancer. In yet another embodiment, the subject is a mammal. In another embodiment, the mammal is a human. In still another embodiment, the human is afflicted with a cancer.

### BRIEF DESCRIPTION OF THE DRAWINGS

[0039] FIG. 1A-FIG. 1C show phenotype and morphology of macrophages driven to different differentiation states. FIG. 1A shows the expression of classical M2 biomarkers after macrophage differentiation. FIG. 1B shows the expression of new M2 biomarkers after macrophage differentiation. FIG. 1C shows morphological images of M1- and M2c-differentiated macrophages.

[0040] FIG. 2A-FIG. 2Y show IC50 curves for siRNAs directed against individual macrophage-associated targets.

[0041] FIG. 3A-FIG. 3E show characterization of surface phenotype and morphology after knockdown of macrophage-associated targets in primary human macrophages. These figures show the effects of siRNA-mediated targe knockdown on target mRNA knockdown (FIG. 3A), cell surface expression of targets (FIG. 3B), classical macrophage phenotypic markers (FIG. 3C), new macrophage phenotypic markers (FIG. 3D), and macrophage morphology (FIG. 3E).

[0042] FIG. 4A-FIG. 4G show characterization of modulated macrophage phenotype and function after inhibition of macrophage-associated targets in primary human macrophages. These figures show the effects of antibody-mediated target inhibition on decreasing classical M2 markers in the presence of M2-skewing conditions (FIG. 4A); new M2 markers in the presence of M2-skewing conditions(FIG. 4B); increasing M1 pro-inflammatory cytokines in the presence of M2-skewing conditions (FIG. 4C); decreasing classical M2 markers, in a dose-dependent fashion, when added after M2-skewing conditions (FIG. 4D); decreasing new M2 markers, in a dose-dependent fashion, when added after M2-skewing conditions (FIG. 4E); and increasing M1 pro-inflammatory cytokine production when added after M2-skewing conditions (FIGS. 4F and 4G).

[0043] FIG. 5A-FIG. 5C show the results of Staphylococcal enterotoxin B (SEB) assay experiments. FIG. 5A shows the results of intracellular cytokine staining of CD3+ T cells after 4 days. FIGS. 5B and 5C show the results of cytokine production after 4 days.

[0044] FIG. 6A-FIG. 6B show the results of one-way mixed lymphocyte reaction (MLR) assay experiments. FIG. 6A shows the results of intracellular staining of CD8+ T cells. Data are shown as the fold-change over isotype control. FIG. 6B shows the results of cytokine production. Data are shown as the fold-change over isotype control.

[0045] FIG. 7A-FIG. 7B show the results of flow cytometry analyses of macrophage-associated target expression on tumor associated macrophages (TAMs) from a variety of cancer types.

[0046] FIG. 8A-FIG. 8D show cytokine production from dissociated tumor samples and tumor slice samples representing 6 different tumor types treated with individual or combinations of antibodies.

[0047] FIG. 9A-FIG. 9C show results of tumor slice cultures. Data are shown as the fold-change over isotype background as controls for lung tumor slice (FIG. 9A), GI tumor slice (FIG. 9B), and kidney tumor slice (FIG. 9C) cultures.

[0048] FIG. 10A-FIG. 10C shows the results of an analysis of immune compositions within tumors. Data are shown for GI tumor (FIG. 10A), kidney tumor (FIG. 10B), and the CD45+ and CD3+ compositions of antibody-treated tumor slices (FIG. 10C).

[0049] FIG. 11 shows the percentage of tumors containing a macrophage (CD11b) signature indicating infiltration of TAMs.

[0050] For any figure showing a bar histogram, curve, or other data associated with a legend, the bars, curve, or other data presented from left to right for each indication correspond directly and in order to the boxes from top to bottom of the legend.

### DETAILED DESCRIPTION OF THE INVENTION

[0051] It has been determined herein that certain targets regulate monocyte and/or macrophage inflammatory phenotype, polarization, activation, and/or function. Accordingly, the present invention relates, in part, to methods of modulating the copy number, amount, and/or activity of one or more biomarkers described herein (e.g., targets listed in Table 1, Table 2, Examples, etc.). and uses of the biomarkers and/or modulatory agents thereof for treating, diagnosing, prognosing, and screening purposes as described further below.

### I. Definitions

[0052] The term “about,” in some embodiments, encompasses values that are within 1%, 2%, 3%, 4%, 5%, 6%, 7%, 8%, 9%, or 10%, inclusive, or any range in between (e.g., plus or minus 2%-6%), of a value that is measured. In some embodiments, the term “about” refers to the inherent variation of error in a method, assay, or measured value, such as the variation that exists among experiments.

[0053] The term “activating receptor” includes immune cell receptors that bind antigen, complexed antigen (e.g., in the context of major histocompatibility complex (MHC) polypeptides), or bind to antibodies. Such activating receptors include T cell receptors (TCR), B cell receptors (BCR), cytokine receptors, LPS receptors, complement receptors, Fc receptors, and other ITAM containing receptors. For example, T cell receptors are present on T cells and are associated with CD3 polypeptides. T cell receptors are stimulated by antigen in the context of MHC polypeptides (as well as by polyclonal T cell activating reagents). T cell activation via the TCR results in numerous changes, e.g., protein phosphorylation, membrane lipid changes, ion fluxes, cyclic nucleotide alterations, RNA transcription changes, protein synthesis changes, and cell volume changes. Similar to T cells activation of macrophages via activation receptors such as, cytokine receptors or pattern associated molecular pattern (PAMP) receptors, results in changes such as protein phosphorylation, alteration to surface receptor phenotype, protein synthesis and release, as well as morphologic changes.

[0054] The term “administering” relates to the actual physical introduction of an agent into or onto (as appropriate) a biological target of interest, such as a host and/or subject. A composition can be administered to the cell (e.g., “contacting”) in vitro or in vivo. A composition can be administered to the subject in vivo via an appropriate route of administration. Any and all methods of introducing the composition into the host are contemplated according to the present invention. The method is not dependent on any particular means of introduction and is not to be so construed. Means of introduction are well-known to those skilled in the art, and are also exemplified herein. The term include routes of administration which allow an agent to perform its intended function. Examples of routes of administration for treatment of a body which can be used include injection (subcutaneous, intravenous, parenterally, intraperitoneally, intrathecal, etc.), oral, inhalation, and transdermal routes. The injection can be bolus injections or can be continuous infusion. Depending on the route of administration, the agent can be coated with or disposed in a selected material to protect it from natural conditions which can detrimentally affect its ability to perform its intended function. The agent can be administered alone, or in conjunction with a pharmaceutically acceptable carrier. The agent also can be administered as a prodrug, which is converted to its active form in vivo.

[0055] The term “agent” refers to a compound, supramolecular complex, material, and/or combination or mixture thereof. A compound (e.g., a molecule) can be represented by a chemical formula, chemical structure, or sequence. Representative, non-limiting examples of agents, include, e.g., small molecules, polypeptides, proteins, polynucleotides (e.g., RNAi agents, siRNA, miRNA, piRNA, mRNA, antisense polynucleotides, aptamers, and the like), lipids, and polysaccharides. In general, agents can be obtained using any suitable method known in the art. In some embodiments, an agent can be a “therapeutic agent” for use in treating a disease or disorder (e.g., cancer) in a subject (e.g., a human).

[0056] The term “agonist” refers to an agent that binds to a target(s) (e.g., a receptor) and activates or increases the biological activity of the target(s). For example, an “agonist” antibody is an antibody that activates or increases the biological activity of the antigen(s) it binds.

[0057] The term “altered amount” or “altered level” encompasses increased or decreased copy number (e.g., germline and/or somatic) of a biomarker nucleic acid, or increased or decreased expression level in a sample of interest, as compared to the copy number or expression level in a control sample. The term “altered amount” of a biomarker also includes an increased or decreased protein level of a biomarker protein in a sample, e.g., a cancer sample, as compared to the corresponding protein level in a normal, control sample. Furthermore, an altered amount of a biomarker protein can be determined by detecting posttranslational modification such as methylation status of the marker, which can affect the expression or activity of the biomarker protein. In some embodiments, the “altered amount” refers to the presence or absence of a biomarker because the reference baseline may be the absence or presence of the biomarker, respectively. The absence or presence of the biomarker can be determined according to the threshold of sensitivity of a given assay used to measure the biomarker.

[0058] The amount of a biomarker in a subject is “significantly” higher or lower than the normal amount of the biomarker, if the amount of the biomarker is greater or less, respectively, than the normal level by an amount greater than the standard error of the assay employed to assess amount, and preferably at least 20%, 30%, 40%, 50%, 60%, 70%, 80%, 90%, 100%, 150%, 200%, 300%, 350%, 400%, 500%, 600%, 700%, 800%, 900%, 1000%, or than that amount. Alternatively, the amount of the biomarker in the subject can be considered “significantly” higher or lower than the normal amount if the amount is at least about two, and preferably at least about three, four, or five times, higher or lower, respectively, than the normal amount of the biomarker. Such “significance” can also be applied to any other measured parameter described herein, such as for expression, inhibition, cytotoxicity, cell growth, and the like.

[0059] The term “altered level of expression” of a biomarker refers to an expression level or copy number of the biomarker in a test sample, e.g., a sample derived from a patient suffering from cancer, that is greater or less than the standard error of the assay employed to assess expression or copy number, and is preferably at least twice, and more preferably three, four, five or ten or more times the expression level or copy number of the biomarker in a control sample (e.g., sample from a healthy subjects not having the associated disease) and preferably, the average expression level or copy number of the biomarker in several control samples. In some embodiments, the level of the biomarker refers to the level of the biomarker itself, the level of a modified biomarker (e.g., phosphorylated biomarker), or to the level of a biomarker relative to another measured variable, such as a control (e.g., phosphorylated biomarker relative to an unphosphorylated biomarker). The term “expression” encompasses the processes by which nucleic acids (e.g., DNA) are transcribed to produce RNA, and can also refer to the processes by which RNA transcripts are processed and translated into polypeptides. The sum of expression of nucleic acids and their polypeptide counterparts, if any, contributes to the amount of a biomarker, such as one or more targets listed in Table 1 and/or Table 2.

[0060] The term “altered activity” of a biomarker refers to an activity of the biomarker which is increased or decreased in a disease state, e.g., in a cancer sample, or a treated state, as compared to the activity of the biomarker in a normal, control sample. Altered activity of the biomarker can be the result of, for example, altered expression of the biomarker, altered protein level of the biomarker, altered structure of the biomarker, or, e.g., an altered interaction with other proteins involved in the same or different pathway as the biomarker or altered interaction with transcriptional activators or inhibitors.

[0061] The term “altered structure” of a biomarker refers to the presence of mutations or allelic variants within a biomarker nucleic acid or protein, e.g., mutations which affect expression or activity of the biomarker nucleic acid or protein, as compared to the normal or wild-type gene or protein. For example, mutations include, but are not limited to substitutions, deletions, or addition mutations. Mutations can be present in the coding or non-coding region of the biomarker nucleic acid.

[0062] The term “altered subcellular localization” of a biomarker refers to the mislocalization of the biomarker within a cell relative to the normal localization within the cell e.g., within a healthy and/or wild-type cell. An indication of normal localization of the marker can be determined through an analysis of subcellular localization motifs known in the field that are harbored by biomarker polypeptides.

[0063] The term “antagonist” or “blocking” refers to an agent that binds to a target(s) (e.g., a receptor) and inhibits or reduces the biological activity of the target(s). For example, an “antagonist” antibody is an antibody that significantly inhibits or reduces biological activity of the antigen(s) it binds.

[0064] Unless otherwise specified here within, the terms “antibody” and “antibodies” broadly encompass naturally-occurring forms of antibodies (e.g., IgG, IgA, IgM, IgE) and recombinant antibodies, such as single-chain antibodies, chimeric and humanized antibodies and multi-specific antibodies, as well as fragments, fusion proteins, and derivatives of all of the foregoing, which fragments and derivatives have at least an antigenic binding site. Antibody derivatives can comprise a protein or chemical moiety conjugated to an antibody.

[0065] In addition, “intrabodies” are a type of well-known antigen-binding molecules having the characteristic of antibodies, but that are capable of being expressed within cells in order to bind and/or inhibit intracellular targets of interest (Chen et al. (1994) Human Gene Ther. 5:595-601). Methods are well-known in the art for adapting antibodies to target (e.g., inhibit) intracellular moieties, such as the use of single-chain antibodies (scFvs), modification of immunoglobulin VL domains for hyperstability, modification of antibodies to resist the reducing intracellular environment, generating fusion proteins that increase intracellular stability and/or modulate intracellular localization, and the like. Intracellular antibodies can also be introduced and expressed in one or more cells, tissues or organs of a multicellular organism, for example for prophylactic and/or therapeutic purposes (e.g., as a gene therapy) (see, at least PCT Publ. Numbers WO 08/020079, WO 94/02610, WO 95/22618, and WO 03/014960; U.S. Pat. No. 7,004,940; Cattaneo and Biocca (1997) Intracellular Antibodies: Development and Applications (Landes and Springer-Verlag publs.); Kontermann (2004) Methods 34:163-170; Cohen et al. (1998) Oncogene 17:2445-2456; Auf der Maur et al. (2001) FEBS Lett. 508:407-412; Shaki-Loewenstein et al. (2005) J. Immunol. Meth. 303:19-39).

[0066] The term “biomarker” refers to a gene or gene product that is a target for modulating one or more phenotypes of interest, such as a phenotype of interest in monocytes and/or macrophages. In this context, the term “biomarker” is synonymous with “target.” In some embodiments, however, the term further encompasses a measurable entity of the target that has been determined to be indicative of an output of interest, such as one or more diagnostic, prognostic, and/or therapeutic outputs (e.g., for modulating an inflammatory phenotype, cancer state, and the like). Biomarkers can include, without limitation, nucleic acids (e.g., genomic nucleic acids and/or transcribed nucleic acids) and proteins, particularly those listed in Table 1 and Table 2. In one embodiment, such targets are negative regulators of inflammatory phenotype, immune response, and/or T cell-mediated cytotoxicity shown in Table 1 and/or positive regulators of inflammatory phenotype, immune response, and/or T cell-mediated cytotoxicity shown in Table 2.

[0067] The terms “cancer” or “tumor” or “hyperproliferative” refer to the presence of cells possessing characteristics typical of cancer-causing cells, such as uncontrolled proliferation, immortality, invasive or metastatic potential, rapid growth, and certain characteristic morphological features. In some embodiments, such cells exhibit such characteristics in part or in full due to the expression and activity of immune checkpoint proteins, such as PD-1, PD-L1, PD-L2, and/or CTLA-4.

[0068] Cancer cells are often in the form of a tumor, but such cells can exist alone within an animal, or can be a non-tumorigenic cancer cell, such as a leukemia cell. As used herein, the term “cancer” includes premalignant as well as malignant cancers. Cancers include, but are not limited to, a variety of cancers, carcinoma including that of the bladder (including accelerated and metastatic bladder cancer), breast, colon (including colorectal cancer), kidney, liver, lung (including small and non-small cell lung cancer and lung adenocarcinoma), ovary, prostate, testes, genitourinary tract, lymphatic system, rectum, larynx, pancreas (including exocrine pancreatic carcinoma), esophagus, stomach, gall bladder, cervix, thyroid, and skin (including squamous cell carcinoma); hematopoietic tumors of lymphoid lineage including leukemia, acute lymphocytic leukemia, acute lymphoblastic leukemia, B-cell lymphoma, T-cell lymphoma, Hodgkins lymphoma, non-Hodgkins lymphoma, hairy cell lymphoma, histiocytic lymphoma, and Burketts lymphoma; hematopoietic tumors of myeloid lineage including acute and chronic myelogenous leukemias, myelodysplastic syndrome, myeloid leukemia, and promyelocytic leukemia; tumors of the central and peripheral nervous system including astrocytoma, neuroblastoma, glioma, and schwannomas; tumors of mesenchymal origin including fibrosarcoma, rhabdomyosarcoma, and osteosarcoma; other tumors including melanoma, xenoderma pigmentosum, keratoactanthoma, seminoma, thyroid follicular cancer, and teratocarcinoma; melanoma, unresectable stage III or IV malignant melanoma, squamous cell carcinoma, small-cell lung cancer, non-small cell lung cancer, glioma, gastrointestinal cancer, renal cancer, ovarian cancer, liver cancer, colorectal cancer, endometrial cancer, kidney cancer, prostate cancer, thyroid cancer, neuroblastoma, pancreatic cancer, glioblastoma multiforme, cervical cancer, stomach cancer, bladder cancer, hepatoma, breast cancer, colon carcinoma, and head and neck cancer, gastric cancer, germ cell tumor, bone cancer, bone tumors, adult malignant fibrous histiocytoma of bone; childhood, malignant fibrous histiocytoma of bone, sarcoma, pediatric sarcoma, sinonasal natural killer, neoplasms, plasma cell neoplasm; myelodysplastic syndromes; neuroblastoma; testicular germ cell tumor, intraocular melanoma, myelodysplastic syndromes; myelodysplastic/myeloproliferative diseases, synovial sarcoma, chronic myeloid leukemia, acute lymphoblastic leukemia, Philadelphia chromosome positive acute lymphoblastic leukemia (Ph+ ALL), multiple myeloma, acute myelogenous leukemia, chronic lymphocytic leukemia, mastocytosis and any symptom associated with mastocytosis, and any metastasis thereof. In addition, disorders include urticaria pigmentosa, mastocytosises such as diffuse cutaneous mastocytosis, solitary mastocytoma in human, as well as dog mastocytoma and some rare subtypes like bullous, erythrodermic and teleangiectatic mastocytosis, mastocytosis with an associated hematological disorder, such as a myeloproliferative or myelodysplastic syndrome, or acute leukemia, myeloproliferative disorder associated with mastocytosis, mast cell leukemia, in addition to other cancers. Other cancers are also included within the scope of disorders including, but are not limited to, the following: carcinoma, including that of the bladder, urothelial carcinoma, breast, colon, kidney, liver, lung, ovary, pancreas, stomach, cervix, thyroid, testis, particularly testicular seminomas, and skin; including squamous cell carcinoma; gastrointestinal stromal tumors (“GIST”); hematopoietic tumors of lymphoid lineage, including leukemia, acute lymphocytic leukemia, acute lymphoblastic leukemia, B-cell lymphoma, T-cell lymphoma, Hodgkins lymphoma, non-Hodgkins lymphoma, hairy cell lymphoma and Burketts lymphoma; hematopoietic tumors of myeloid lineage, including acute and chronic myelogenous leukemias and promyelocytic leukemia; tumors of mesenchymal origin, including fibrosarcoma and rhabdomyosarcoma; other tumors, including melanoma, seminoma, tetratocarcinoma, neuroblastoma and glioma; tumors of the central and peripheral nervous system, including astrocytoma, neuroblastoma, glioma, and schwannomas; tumors of mesenchymal origin, including fibrosarcoma, rhabdomyosarcoma, and osteosarcoma; and other tumors, including melanoma, xenoderma pigmentosum, keratoactanthoma, seminoma, thyroid follicular cancer, teratocarcinoma, chemotherapy refractory non-seminomatous germ-cell tumors, and Kaposi's sarcoma, and any metastasis thereof. Other non-limiting examples of types of cancers applicable to the methods encompassed by the present invention include human sarcomas and carcinomas, e.g., fibrosarcoma, myxosarcoma, liposarcoma, chondrosarcoma, osteogenic sarcoma, chordoma, angiosarcoma, endotheliosarcoma, lymphangiosarcoma, lymphangioendotheliosarcoma, synovioma, mesothelioma, Ewing's tumor, leiomyosarcoma, rhabdomyosarcoma, squamous cell carcinoma, basal cell carcinoma, adenocarcinoma, sweat gland carcinoma, sebaceous gland carcinoma, papillary carcinoma, papillary adenocarcinomas, cystadenocarcinoma, medullary carcinoma, bronchogenic carcinoma, renal cell carcinoma, hepatoma, bile duct carcinoma, choriocarcinoma, seminoma, embryonal carcinoma, Wilms' tumor, bone cancer, brain tumor, lung carcinoma (including lung adenocarcinoma), small cell lung carcinoma, bladder carcinoma, epithelial carcinoma, glioma, astrocytoma, medulloblastoma, craniopharyngioma, ependymoma, pinealoma, hemangioblastoma, acoustic neuroma, oligodendroglioma, meningioma, melanoma, neuroblastoma, retinoblastoma; leukemias, e.g., acute lymphocytic leukemia and acute myelocytic leukemia (myeloblastic, promyelocytic, myelomonocytic, monocytic and erythroleukemia); chronic leukemia (chronic myelocytic (granulocytic) leukemia and chronic lymphocytic leukemia); and polycythemia vera, lymphoma (Hodgkin's disease and non-Hodgkin's disease), multiple myeloma, Waldenstrom's macroglobulinemia, and heavy chain disease. In some embodiments, cancers are epithelial in nature and include but are not limited to, bladder cancer, breast cancer, cervical cancer, colon cancer, gynecologic cancers, renal cancer, laryngeal cancer, lung cancer, oral cancer, head and neck cancer, ovarian cancer, pancreatic cancer, prostate cancer, or skin cancer. In some embodiments, the epithelial cancer is non-small-cell lung cancer, nonpapillary renal cell carcinoma, cervical carcinoma, ovarian carcinoma (e.g., serous ovarian carcinoma), or breast carcinoma. The epithelial cancers can be characterized in various other ways including, but not limited to, serous, endometrioid, mucinous, clear cell, Brenner, or undifferentiated. In some embodiments, the cancer is selected from the group consisting of (advanced) non-small cell lung cancer, melanoma, head and neck squamous cell cancer, (advanced) urothelial bladder cancer, (advanced) kidney cancer (RCC), microsatellite instability-high cancer, classical Hodgkin lymphoma, (advanced) gastric cancer, (advanced) cervical cancer, primary mediastinal B-cell lymphoma, (advanced) hepatocellular carcinoma, and (advanced) merkel cell carcinoma.

[0069] The term “coding region” refers to regions of a nucleotide sequence comprising codons which are translated into amino acid residues, whereas the term “noncoding region” refers to regions of a nucleotide sequence that are not translated into amino acids (e.g., 5′ and 3′ untranslated regions).

[0070] The term “complementary” refers to the broad concept of sequence complementarity between regions of two nucleic acid strands or between two regions of the same nucleic acid strand. It is known that an adenine residue of a first nucleic acid region is capable of forming specific hydrogen bonds (“base pairing”) with a residue of a second nucleic acid region which is antiparallel to the first region if the residue is thymine or uracil. Similarly, it is known that a cytosine residue of a first nucleic acid strand is capable of base pairing with a residue of a second nucleic acid strand which is antiparallel to the first strand if the residue is guanine. A first region of a nucleic acid is complementary to a second region of the same or a different nucleic acid if, when the two regions are arranged in an antiparallel fashion, at least one nucleotide residue of the first region is capable of base pairing with a residue of the second region. Preferably, the first region comprises a first portion and the second region comprises a second portion, whereby, when the first and second portions are arranged in an antiparallel fashion, at least about 50%, and preferably at least about 60%, 65%, 70%, 75%, 80%, 85%, 90%, 95%, 98%, 99%, 99.5%, 99.9%, or greater of the nucleotide residues of the first portion are capable of base pairing with nucleotide residues in the second portion. More preferably, all nucleotide residues of the first portion are capable of base pairing with nucleotide residues in the second portion. In some embodiments, complementary polynucleotides can be “sufficiently complementary” or can have “sufficient complementarity,” that is, complementarity sufficient to maintain a duplex and/or have a desired activity. For example, in the case of RNAi agents, such complementarity is complementarity between the agent and a target mRNA that is sufficient to partly or completely prevent translation of the mRNA. For example, an siRNA having a “sequence sufficiently complementary to a target mRNA sequence to direct target-specific RNA interference (RNAi)” means that the siRNA has a sequence sufficient to trigger the destruction of the target mRNA by the RNAi machinery or process.

[0071] The term “substantially complementary” refers to complementarity in a base-paired, double-stranded region between two nucleic acids and not any single-stranded region such as a terminal overhang or a gap region between two double-stranded regions. The complementarity does not need to be perfect; there can be any number of base pair mismatches. In some embodiments, when two sequences are referred to as “substantially complementary” herein, it is meant that the sequences are sufficiently complementary to each other to hybridize under the selected reaction conditions. Accordingly, substantially complementary sequences can refer to sequences with base-pair complementarity of at least 100, 99, 98, 97, 96, 95, 94, 93, 92, 91, 90, 85, 80, 75, 70, 65, 60 percent or more, or any number in between, in a double-stranded region.

[0072] The terms “conjoint therapy” and “combination therapy,” as used herein, refer to the administration of two or more therapeutic agents, e.g., combination of modulators of more than one target listed in Table 1, combination of modulators of more than one target listed in Table 2, combination of at least one modulator of at least one target listed in Table 1 and at least one modulator of at least one target listed in Table 2, combination of at least one modulator of at least one target listed in Table 1 and/or Table 2 and an additional therapeutic agent, such as an immune checkpoint therapy, and the like), and combinations thereof. The different agents comprising the combination therapy can be administered concomitant with, prior to, or following, the administration of the other or others. The combination therapy is intended to provide a beneficial (additive or synergistic) effect from the co-action of these therapeutic agents. Administration of these therapeutic agents in combination can be carried out over a defined time period (usually minutes, hours, days, or weeks depending upon the combination selected). In combination therapy, combined therapeutic agent can be applied in a sequential manner, or by substantially simultaneous application.

[0073] The term “control” refers to any reference standard suitable to provide a comparison to the expression products in the test sample. In one embodiment, the control comprises obtaining a “control sample” from which expression product levels are detected and compared to the expression product levels from the test sample. Such a control sample can comprise any suitable sample, including but not limited to a sample from subject, such as a subject having monocytes and/or macrophages and/or a control cancer patient (can be a stored sample or previous sample measurement) with a known outcome; normal tissue or cells isolated from a subject, such as a normal patient or the cancer patient, cultured primary cells/tissues isolated from a subject such as a normal subject or the cancer patient, adjacent normal cells/tissues obtained from the same organ or body location of the cancer patient, a tissue or cell sample isolated from a normal subject, or a primary cells/tissues obtained from a depository. In another preferred embodiment, the control can comprise a reference standard expression product level from any suitable source, including but not limited to housekeeping genes, an expression product level range from normal tissue (or other previously analyzed control sample), a previously determined expression product level range within a test sample from a group of patients, or a set of patients with a certain outcome (for example, survival for one, two, three, four years, etc.) or receiving a certain treatment (for example, standard of care cancer therapy). It will be understood by those of skill in the art that such control samples and reference standard expression product levels can be used in combination as controls in the methods encompassed by the present invention. In one embodiment, the control can comprise normal or non-cancerous cell/tissue sample. In another preferred embodiment, the control can comprise an expression level for a set of patients, such as a set of cancer patients, or for a set of cancer patients receiving a certain treatment, or for a set of patients with one outcome versus another outcome. In the former case, the specific expression product level of each patient can be assigned to a percentile level of expression, or expressed as either higher or lower than the mean or average of the reference standard expression level. In another preferred embodiment, the control can comprise normal cells, cells from patients treated with combination chemotherapy, and cells from patients having benign cancer. In another embodiment, the control can also comprise a measured value for example, average level of expression of a particular gene in a population compared to the level of expression of a housekeeping gene in the same population. Such a population can comprise normal subjects, cancer patients who have not undergone any treatment (i.e., treatment naive), cancer patients undergoing standard of care therapy, or patients having benign cancer. In another preferred embodiment, the control comprises a ratio transformation of expression product levels, including but not limited to determining a ratio of expression product levels of two genes in the test sample and comparing it to any suitable ratio of the same two genes in a reference standard; determining expression product levels of the two or more genes in the test sample and determining a difference in expression product levels in any suitable control; and determining expression product levels of the two or more genes in the test sample, normalizing their expression to expression of housekeeping genes in the test sample, and comparing to any suitable control. In particularly preferred embodiments, the control comprises a control sample which is of the same lineage and/or type as the test sample. In another embodiment, the control can comprise expression product levels grouped as percentiles within or based on a set of patient samples, such as all patients with cancer. In one embodiment a control expression product level is established wherein higher or lower levels of expression product relative to, for instance, a particular percentile, are used as the basis for predicting outcome. In another preferred embodiment, a control expression product level is established using expression product levels from cancer control patients with a known outcome, and the expression product levels from the test sample are compared to the control expression product level as the basis for predicting outcome. The methods encompassed by the present invention are not limited to use of a specific cut-off point in comparing the level of expression product in the test sample to the control.

[0074] The “copy number” of a biomarker nucleic acid refers to the number of DNA sequences in a cell (e.g., germline and/or somatic) encoding a particular gene product. Generally, for a given gene, a mammal has two copies of each gene. The copy number can be increased, however, by gene amplification or duplication, or reduced by deletion. For example, germline copy number changes include changes at one or more genomic loci, wherein said one or more genomic loci are not accounted for by the number of copies in the normal complement of germline copies in a control (e.g., the normal copy number in germline DNA for the same species as that from which the specific germline DNA and corresponding copy number were determined). Somatic copy number changes include changes at one or more genomic loci, wherein said one or more genomic loci are not accounted for by the number of copies in germline DNA of a control (e.g., copy number in germline DNA for the same subject as that from which the somatic DNA and corresponding copy number were determined).

[0075] The term “cytokine” refers to a substance secreted by certain cells of the immune system and has a biological effect on other cells. Cytokines can be a number of different substances such as interferons, interleukins and growth factors.

[0076] The term “determining a suitable treatment regimen for the subject” is taken to mean the determination of a treatment regimen (i.e., a single therapy or a combination of different therapies that are used for the prevention and/or treatment of the cancer in the subject) for a subject that is started, modified and/or ended based or essentially based or at least partially based on the results of a biomarker-mediated analysis encompassed by the present invention. One example is determining whether to provide targeted therapy against a cancer to provide therapy using an agent encompassed by the present invention that modulates one or more biomarkers. Another example is starting an adjuvant therapy after surgery whose purpose is to decrease the risk of recurrence. Still another example is to modify the dosage of a particular chemotherapy. The determination can, in addition to the results of the analysis according to the present invention, be based on personal characteristics of the subject to be treated. In most cases, the actual determination of the suitable treatment regimen for the subject will be performed by the attending physician or doctor.

[0077] The term “endotoxin-free” or “substantially endotoxin-free” refers to compositions, solvents, and/or vessels that contain at most trace amounts (e.g., amounts having no clinically adverse physiological effects to a subject) of endotoxin, and preferably undetectable amounts of endotoxin. Endotoxins are toxins associated with certain bacteria, typically gram-negative bacteria, although endotoxins may be found in gram-positive bacteria, such as Listeria monocytogenes. The most prevalent endotoxins are lipopolysaccharides (LPS) or lipo-oligo-saccharides (LOS) found in the outer membrane of various Gram-negative bacteria, and which represent a central pathogenic feature in the ability of these bacteria to cause disease. Small amounts of endotoxin in humans may produce fever, a lowering of the blood pressure, and activation of inflammation and coagulation, among other adverse physiological effects.

Therefore, in pharmaceutical production, it is often desirable to remove most or all traces of endotoxin from drug products and/or drug containers, because even small amounts may cause adverse effects in humans. A depyrogenation oven may be used for this purpose, as temperatures in excess of 300° C. are typically required to break down most endotoxins. For instance, based on primary packaging material such as syringes or vials, the combination of a glass temperature of 250° C. and a holding time of 30 minutes is often sufficient to achieve a 3 log reduction in endotoxin levels. Other methods of removing endotoxins are contemplated, including, for example, chromatography and filtration methods, as described herein and known in the art. Endotoxins may be detected using routine techniques known in the art. For example, the limulus amoebocyte lysate assay, which utilizes blood from the horseshoe crab, is a very sensitive assay for detecting presence of endotoxin. In this test, very low levels of LPS may cause detectable coagulation of the limulus lysate due a powerful enzymatic cascade that amplifies this reaction. Endotoxins may also be quantitated by enzyme-linked immunosorbent assay (ELISA). To be substantially endotoxin free, endotoxin levels may be less than about 0.001, 0.005, 0.01, 0.02, 0.03, 0.04, 0.05, 0.06, 0.08, 0.09, 0.1, 0.5, 1.0, 1.5, 2, 2.5, 3, 4, 5, 6, 7, 8, 9, or 10 EU/ml, or any range in between, inclusive, such as 0.05 to 10 EU/ml. Typically, 1 ng lipopolysaccharide (LPS) corresponds to about 1-10 EU.

[0078] The term “expression signature” or “signature” refers to a group of one or more expressed biomarkers indicative of a state of interest. For example, the genes, proteins, and the like making up this signature can be expressed in a specific cell lineage, stage of differentiation, or during a particular biological response. The biomarkers can reflect biological aspects of the tumors in which they are expressed, such as the inflammatory state of a cell, the cell of origin of a cancer, the nature of a non-malignant cells in the biopsy, and the oncogenic mechanisms responsible for the cancer. Expression data and gene expression levels can be stored on computer readable media, e.g., the computer readable medium used in conjunction with a microarray or chip reading device. Such expression data can be manipulated to generate expression signatures.

[0079] The term “gene” encompasses a nucleotide (e.g., DNA) sequence that encodes a molecule (e.g., RNA, protein, etc.) that has a function. A gene generally comprises two complementary nucleotide strands (i.e., dsDNA), a coding strand and a non-coding strand. When referring to DNA transcription, the coding strand is the DNA strand whose base sequence corresponds to the base sequence of the RNA transcript produced (although with thymine replaced by uracil). The coding strand contains codons, while the non-coding strand contains anticodons. During transcription, RNA Pol II binds the non-coding strand, reads the anti-codons, and transcribes their sequence to synthesize an RNA transcript with complementary bases. In some embodiments, the gene sequence (i.e., DNA sequence) listed is the sequence of the coding strand.

[0080] The term “gene product” (also referred to herein as “gene expression product” or “expression product”) encompasses products resulting from expression of a gene, such as nucleic acids (e.g., mRNA) transcribed from the gene, and polypeptides or proteins arising from translation of such mRNA. It will be appreciated that certain gene products can undergo processing or modification, e.g, in a cell. For example, mRNA transcripts can be spliced, polyadenylated, etc., prior to translation, and/or polypeptides can undergo co-translational or post-translational processing, such as removal of secretion signal sequences, removal of organelle targeting sequences, or modifications such as phosphorylation, glycosylation, methylation, fatty acylation, etc. The term “gene product” encompasses such processed or modified forms. Genomic mRNA and polypeptide sequences from a variety of species, including human, are known in the art and are available in publicly accessible databases such as those available at the National Center for Biotechnology Information (ncbi.nih.gov) or Universal Protein Resource (uniprot.org). Other databases include, e.g., GenBank, RefSeq, Gene, UniProtKB/SwissProt, UniProtKB/Trembl, and the like. In general, sequences in the NCBI Reference Sequence database can be used as gene product sequences for a gene of interest. It will be appreciated that multiple alleles of a gene can exist among individuals of the same species. Multiple isoforms of certain proteins can exist, e.g., as a result of alternative RNA splicing or editing. In general, where aspects of this disclosure pertain to a gene or gene product, embodiments pertaining to allelic variants or isoforms are encompassed, if applicable, unless indicated otherwise. Certain embodiments can be directed to particular sequence(s), e.g., particular allele(s) or isoform(s).

[0081] The term “generating” encompasses any manner in which a desired result is achieved, such as by direct or indirect action. For example, cells having modulated phenotypes described herein can be generated by direct action, such as by contact with at least one agent that modulates one or more biomarkers described herein, and/or by indirect action, such as by propagating cells having a desired physical, genetic, and/or phenotypic attributes.

[0082] The terms “high,” “low,” “intermediate,” and “negative” in connection with cellular biomarker expression refers to the amount of the biomarker expressed relative to the cellular expression of the biomarker by one or more reference cells. Biomarker expression can be determined according to any method described herein including, without limitation, an analysis of the cellular level, activity, structure, and the like, of one or more biomarker genomic nucleic acids, ribonucleic acids, and/or polypeptides. In one embodiment, the terms refer to a defined percentage of a population of cells expressing the biomarker at the highest, intermediate, or lowest levels, respectively. Such percentages can be defined as the top 0.1%, 0.5%, 1.0%, 1.5%, 2.0%, 2.5%, 3.0%, 3.5%, 4.0%, 4.5%, 5.0%, 5.5%, 6.0%, 6.5%, 7.0%, 7.5%, 8.0%, 8.5%, 9.0%, 9.5%, 10%, 11%, 12%, 13%, 14%, 15% or more, or any range in between, inclusive, of a population of cells that either highly express or weakly express the biomarker. The term “low” excludes cells that do not detectably express the biomarker, since such cells are “negative” for biomarker expression. The term “intermediate” includes cells that express the biomarker, but at levels lower than the population expressing it at the “high” level. In another embodiment, the terms can also refer to, or in the alternative refer to, cell populations of biomarker expression identified by qualitative or statistical plot regions. For example, cell populations sorted using flow cytometry can be discriminated on the basis of biomarker expression level by identifying distinct plots based on detectable moiety analysis, such as based on mean fluorescence intensities and the like, according to well-known methods in the art. Such plot regions can be refined according to number, shape, overlap, and the like based on well-known methods in the art for the biomarker of interest. In still another embodiment, the terms can also be determined according to the presence or absence of expression for additional biomarkers.

[0083] The term “substantially identical” refers to a nucleic acid or amino acid sequence that, when optimally aligned, for example using the methods described below, share at least 60%, 65%, 70%, 75%, 80%, 85%, 90%, 95%, 96%, 97%, 98%, 99%, or 100% sequence identity with a second nucleic acid or amino acid sequence. “Substantial identity” can be used to refer to various types and lengths of sequence, such as full-length sequence, functional domains, coding and/or regulatory sequences, exons, introns, promoters, and genomic sequences. Percent sequence identity between two polypeptides or nucleic acid sequences is determined in various ways that are within the skill in the art, for instance, using publicly available computer software such as BLAST program (Basic Local Alignment Search Tool; (Altschul et al. (1995) J. Mol. Biol. 215:403-410), BLAST-2, BLAST-P, BLAST-N, BLAST-X, WU-BLAST-2, ALIGN, ALIGN-2, CLUSTAL, or Megalign (DNASTAR) software. In addition, those skilled in the art can determine appropriate parameters for measuring alignment, including any algorithms needed to achieve maximal alignment over the length of the sequences being compared. It is understood that for the purposes of determining sequence identity when comparing a DNA sequence to an RNA sequence, a thymine nucleotide is equivalent to a uracil nucleotide. Conservative substitutions typically include substitutions within the following groups: glycine, alanine; valine, isoleucine, leucine; aspartic acid, glutamic acid, asparagine, glutamine; serine, threonine; lysine, arginine; and phenylalanine, tyrosine.

[0084] The term “immune cell” refers to a cell that is capable of participating, directly or indirectly, in an immune response. Immune cells include, but are not limited to T cells, B cells, antigen presenting cells, dendritic cells, natural killer (NK) cells, natural killer T (NK) cells, lymphokine-activated killer (LAK) cells, monocytes, macrophages, eosinophils, basophils, neutrophils, granulocytes, mast cells, platelets, Langerhan's cells, stem cells, peripheral blood mononuclear cells, cytotoxic T cells, tumor infiltrating lymphocytes (TIL), and the like. An “antigen presenting cell” (APC) is a cell that are capable of activating T cells, and includes, but is not limited to, monocytes/macrophages, B cells and dendritic cells (DCs). The term “dendritic cell” or “DC” refers to any member of a diverse population of morphologically similar cell types found in lymphoid or non-lymphoid tissues. These cells are characterized by their distinctive morphology and high levels of surface MHC-class II expression. DCs can be isolated from a number of tissue sources. DCs have a high capacity for sensitizing MHC-restricted T cells and are very effective at presenting antigens to T cells in situ. The antigens can be self-antigens that are expressed during T cell development and tolerance, and foreign antigens that are present during normal immune processes. The term “neutrophil” generally refers to a white blood cell that makes up part of the innate immune system. Neutrophils typically have segmented nucleic containing about 2-5 lobes. Neutrophils frequently migrate to the site of an injury within minutes following trauma. Neutrophils function by releasing cytotoxic compounds, including oxidants, proteases, and cytokines, at a site of injury or infection. The term “activated DC” is a DC that has been pulsed with an antigen and capable of activating an immune cell. The term “NK cell” has its general meaning in the art and refers to a natural killer (NK) cell. One skilled in the art can easily identify NK cells by determining for instance the expression of specific phenotypic marker (e.g., CD56) and identify its function based on, for example, the ability to express different kind of cytokines or the ability to induce cytotoxicity. The term “B cell” refers to an immune cell derived from the bone marrow and/or spleen. B cells can develop into plasma cells which produce antibodies. The term “T cell” refers to a thymus-derived immune cell that participates in a variety of cell-mediated immune reactions, including CD8+ T cell and CD4+ T cell. Conventional T cells, also known as Tconv or Teffs, have effector functions (e.g., cytokine secretion, cytotoxic activity, anti-self-recognition, and the like) to increase immune responses by virtue of their expression of one or more T cell receptors. Tconv or Teffs are generally defined as any T cell population that is not a Treg and include, for example, naïve T cells, activated T cells, memory T cells, resting Tconv, or Tconv that have differentiated toward, for example, the Th1 or Th2 lineages. In some embodiments, Teffs are a subset of non-regulatory T cells (Tregs). In some embodiments, Teffs are CD4+ Teffs or CD8+ Teffs, such as CD4+ helper T lymphocytes (e.g., Th0, Th1, Tfh, or Th17) and CD8+ cytotoxic T cells (lymphocytes). As described further herein, cytotoxic T cells are CD8+T lymphocytes. “Naïve Tconv” are CD4⁺ T cells that have differentiated in bone marrow, and successfully underwent a positive and negative processes of central selection in a thymus, but have not yet been activated by exposure to an antigen. Naïve Tconv are commonly characterized by surface expression of L-selectin (CD62L), absence of activation markers such as CD25, CD44 or CD69, and absence of memory markers such as CD45RO. Naïve Tconv are therefore believed to be quiescent and non-dividing, requiring interleukin-7 (IL-7) and interleukin-15 (IL-15) for homeostatic survival (see, at least WO 2010/101870). The presence and activity of such cells are undesired in the context of suppressing immune responses. Unlike Tregs, Tconv are not anergic and can proliferate in response to antigen-based T cell receptor activation (Lechler et al. (2001) Philos. Trans. R Soc. Lond. Biol. Sci. 356:625-637). In tumors, exhausted cells can present hallmarks of anergy.

[0085] The term “immunoregulator” refers to a substance, an agent, a signaling pathway or a component thereof that regulates an immune response. The terms “regulating,” “modifying,” or “modulating” with respect to an immune response refer to any alteration in a cell of the immune system or in the activity of such cell. Such regulation includes stimulation or suppression of the immune system (or a distinct part thereof), which can be manifested by an increase or decrease in the number of various cell types, an increase or decrease in the activity of these cells, or any other changes which can occur within the immune system. Both inhibitory and stimulatory immunoregulators have been identified, some of which can have enhanced function in the cancer microenvironment.

[0086] The term “immune response” means a defensive response a body develops against a “foreigner,” such as bacteria, viruses, and pathogens, as well as against targets that may not necessarily originate outside the body, including, without limitation, a defensive response against substances naturally present in the body (e.g., autoimmunity against self-antigens) or against transformed (e.g., cancer) cells. An immune response in particular is the activation and/or action of a cell of the immune system (for example, T lymphocytes, B lymphocytes, natural killer (NK) cells, macrophages, eosinophils, mast cells, dendritic cells and neutrophils) and soluble macromolecules produced by any of these cells or the liver (including antibodies (humoral response), cytokines, and complement) that results in selective targeting, binding to, damage to, destruction of, and/or elimination from a vertebrate's body of invading pathogens, cells or tissues infected with pathogens, cancerous or other abnormal cells, or, in cases of autoimmunity or pathological inflammation, normal human cells or tissues. An anti-cancer immune response refers to an immune surveillance mechanism by which a body recognizes abnormal tumor cells and initiates both the innate and adaptive of the immune system to eliminate dangerous cancer cells.

[0087] The innate immune system is a non-specific immune system that comprises the cells (e.g., natural killer cells, mast cells, eosinophils, basophils; and the phagocytic cells including macrophages, neutrophils, and dendritic cells) and mechanisms that defend the host from infection by other organisms. An innate immune response can initiate the productions of cytokines, and active complement cascade and adaptive immune response. The adaptive immune system is specific immune system that is required and involved in highly specialized systemic cell activation and processes, such as antigen presentation by an antigen presenting cell; antigen specific T cell activation and cytotoxic effect.

[0088] The term “immunotherapeutic agent” can include any molecule, peptide, antibody or other agent which can stimulate a host immune system to generate an immune response to a tumor or cancer in the subject. Various immunotherapeutic agents are useful in the compositions and methods described herein.

[0089] The term “inhibit” or “downregulate” includes the decrease, limitation, or blockage, of, for example a particular action, function, or interaction. In some embodiments, cancer is “inhibited” if at least one symptom of the cancer is alleviated, terminated, slowed, or prevented. As used herein, cancer is also “inhibited” if recurrence or metastasis of the cancer is reduced, slowed, delayed, or prevented. Similarly, a biological function, such as the function of a protein, is inhibited if it is decreased as compared to a reference state, such as a control like a wild-type state. Such inhibition or deficiency can be induced, such as by application of an agent at a particular time and/or place, or can be constitutive, such as by a heritable mutation. Such inhibition or deficiency can also be partial or complete (e.g., essentially no measurable activity in comparison to a reference state, such as a control like a wild-type state). Essentially complete inhibition or deficiency is referred to as blocked. The term “promote” or “upregulate” has the opposite meaning.

[0090] The term “interaction,” when referring to an interaction between two molecules, refers to the physical contact (e.g., binding) of the molecules with one another. Generally, such an interaction results in an activity (which produces a biological effect) of one or both of said molecules. The activity can be a direct activity of one or both of the molecules, (e.g., signal transduction). Alternatively, one or both molecules in the interaction can be prevented from binding their ligand, and thus be held inactive with respect to ligand binding activity (e.g., binding its ligand and triggering or inhibiting costimulation). To inhibit such an interaction results in the disruption of the activity of one or more molecules involved in the interaction. To enhance such an interaction is to prolong or increase the likelihood of said physical contact, and prolong or increase the likelihood of said activity.

[0091] An “isolated protein” refers to a protein that is substantially free of other proteins, cellular material, separation medium, and culture medium when isolated from cells or produced by recombinant DNA techniques, or chemical precursors or other chemicals when chemically synthesized. An “isolated” or “purified” protein or biologically active portion thereof is substantially free of cellular material or other contaminating proteins from the cell or tissue source from which the antibody, polypeptide, peptide or fusion protein is derived, or substantially free from chemical precursors or other chemicals when chemically synthesized. The language “substantially free of cellular material” includes preparations of a biomarker polypeptide or fragment thereof, in which the protein is separated from cellular components of the cells from which it is isolated or recombinantly produced. In one embodiment, the language “substantially free of cellular material” includes preparations of a biomarker protein or fragment thereof, having less than about 30% (by dry weight) of non-biomarker protein (also referred to herein as a “contaminating protein”), more preferably less than about 20% of non-biomarker protein, still more preferably less than about 10% of non-biomarker protein, and most preferably less than about 5% non-biomarker protein. When antibody, polypeptide, peptide or fusion protein or fragment thereof, e.g., a biologically active fragment thereof, is recombinantly produced, it is also preferably substantially free of culture medium, i.e., culture medium represents less than about 20%, more preferably less than about 10%, and most preferably less than about 5% of the volume of the protein preparation.

[0092] The term “isotype” refers to the antibody class (e.g., IgM, IgG1, IgG2C, and the like) that is encoded by heavy chain constant region genes.

[0093] The term “K_{D}” is intended to refer to the dissociation equilibrium constant of a particular antibody-antigen interaction. The binding affinity of antibodies of the disclosed invention can be measured or determined by standard antibody-antigen assays, for example, competitive assays, saturation assays, or standard immunoassays such as ELISA or RIA.

[0094] The term “microenvironment” generally refers to the localized area in a tissue area of interest and can, for example, refer to a “tumor microenvironment.” The term “tumor microenvironment” or “TME” refers to the surrounding microenvironment that constantly interacts with tumor cells which is conducive to allow cross-talk between tumor cells and its environment. The tumor microenvironment can include the cellular environment of the tumor, surrounding blood vessels, immune cells, fibroblasts, bone marrow derived inflammatory cells, lymphocytes, signaling molecules and the extracellular matrix. The tumor environment can include tumor cells or malignant cells that are aided and influenced by the tumor microenvironment to ensure growth and survival. The tumor microenvironment can also include tumor-infiltrating immune cells, such as lymphoid and myeloid cells, which can stimulate or inhibit the antitumor immune response, and stromal cells such as tumor-associated fibroblasts and endothelial cells that contribute to the tumor's structural integrity. Stromal cells can include cells that make up tumor-associated blood vessels, such as endothelial cells and pericytes, which are cells that contribute to structural integrity (fibroblasts), as well as tumor-associated macrophages (TAMs) and infiltrating immune cells, including monocytes, neutrophils (PMN), dendritic cells (DCs), T and B cells, mast cells, and natural killer (NK) cells. The stromal cells make up the bulk of tumor cellularity, while the dominating cell type in solid tumors is the macrophage.

[0095] The term “modulating” and its grammatical equivalents refer to either increasing or decreasing (e.g., silencing), in other words, either up-regulating or down-regulating.

[0096] The “normal” level of expression of a biomarker is the level of expression of the biomarker in cells of a subject, e.g., a human patient, not afflicted with a cancer.

[0097] An “over-expression” or “significantly higher level of expression” of a biomarker refers to an expression level in a test sample that is greater than the standard error of the assay employed to assess expression, and is preferably at least 10%, and more preferably 1.2, 1.3, 1.4, 1.5, 1.6, 1.7, 1.8, 1.9, 2.0, 2.1, 2.1, 2.2, 2.3, 2.4, 2.5, 2.6, 2.7, 2.8, 2.9, 3, 3.5, 4, 4.5, 5, 5.5, 6, 6.5, 7, 7.5, 8, 8.5, 9, 9.5, 10, 10.5, 11, 12, 13, 14, 15, 16, 17, 18, 19, 20 times or more higher than the expression activity or level of the biomarker in a control sample (e.g., sample from a healthy subject not having the biomarker associated disease) and preferably, the average expression level of the biomarker in several control samples. A “significantly lower level of expression” of a biomarker refers to an expression level in a test sample that is at least 10%, and more preferably 1.2, 1.3, 1.4, 1.5, 1.6, 1.7, 1.8, 1.9, 2.0, 2.1, 2.1, 2.2, 2.3, 2.4, 2.5, 2.6, 2.7, 2.8, 2.9, 3, 3.5, 4, 4.5, 5, 5.5, 6, 6.5, 7, 7.5, 8, 8.5, 9, 9.5, 10, 10.5, 11, 12, 13, 14, 15, 16, 17, 18, 19, 20 times or more lower than the expression level of the biomarker in a control sample (e.g., sample from a healthy subject not having the biomarker associated disease) and preferably, the average expression level of the biomarker in several control samples.

[0098] Such “significance” levels can also be applied to any other measured parameter described herein, such as for expression, inhibition, cytotoxicity, cell growth, and the like.

[0099] The term “peripheral blood cell subtypes” refers to cell types normally found in the peripheral blood including, but is not limited to, eosinophils, neutrophils, T cells, monocytes, macrophages, NK cells, granulocytes, and B cells.

[0100] The term “pre-determined” biomarker amount and/or activity measurement(s) can be a biomarker amount and/or activity measurement(s) used to, by way of example only, evaluate a subject that can be selected for a particular treatment, evaluate a response to a treatment such as one or more modulators of one or more biomarkers described herein and/or evaluate the disease state. A pre-determined biomarker amount and/or activity measurement(s) can be determined in populations of patients, such as those with or without cancer. The pre-determined biomarker amount and/or activity measurement(s) can be a single number, equally applicable to every patient, or the pre-determined biomarker amount and/or activity measurement(s) can vary according to specific subpopulations of patients. Age, weight, height, and other factors of a subject can affect the pre-determined biomarker amount and/or activity measurement(s) of the individual. Furthermore, the pre-determined biomarker amount and/or activity can be determined for each subject individually. In one embodiment, the amounts determined and/or compared in a method described herein are based on absolute measurements. In another embodiment, the amounts determined and/or compared in a method described herein are based on relative measurements, such as ratios (e.g., cell ratios or serum biomarker normalized to the expression of housekeeping or otherwise generally constant biomarker). The pre-determined biomarker amount and/or activity measurement(s) can be any suitable standard. For example, the pre-determined biomarker amount and/or activity measurement(s) can be obtained from the same or a different human for whom a patient selection is being assessed. In one embodiment, the pre-determined biomarker amount and/or activity measurement(s) can be obtained from a previous assessment of the same patient. In such a manner, the progress of the selection of the patient can be monitored over time. In addition, the control can be obtained from an assessment of another human or multiple humans, e.g., selected groups of humans, if the subject is a human. In such a manner, the extent of the selection of the human for whom selection is being assessed can be compared to suitable other humans, e.g., other humans who are in a similar situation to the human of interest, such as those suffering from similar or the same condition(s) and/or of the same ethnic group.

[0101] The term “predictive” includes the use of a biomarker nucleic acid and/or protein status, e.g., over- or under-activity, emergence, expression, growth, remission, recurrence or resistance of tumors before, during or after therapy, for determining the likelihood of a desired. Such predictive use of the biomarker can be confirmed by, e.g., (1) increased or decreased copy number (e.g., by FISH, FISH plus SKY, single-molecule sequencing, e.g., as described in the art at least at J. Biotechnol., 86:289-301, or qPCR), overexpression or underexpression of a biomarker nucleic acid (e.g., by ISH, Northern Blot, or qPCR), increased or decreased biomarker protein (e.g., by IHC), or increased or decreased activity, e.g., in more than about 5%, 6%, 7%, 8%, 9%, 10%, 11%, 12%, 13%, 14%, 15%, 20%, 25%, 30%, 40%, 50%, 60%, 70%, 80%, 90%, 95%, 100%, or more of assayed human cancers types or cancer samples; (2) its absolute or relatively modulated presence or absence in a biological sample, e.g., a sample containing tissue, whole blood, serum, plasma, buccal scrape, saliva, cerebrospinal fluid, urine, stool, or bone marrow, from a subject, e.g., a human, afflicted with cancer; (3) its absolute or relatively modulated presence or absence in clinical subset of patients with cancer (e.g., those responding to a particular modulator of T-cell mediated cytotoxicity alone or in combination with immunotherapy or those developing resistance thereto).

[0102] The terms “prevent,” “preventing,” “prevention,” “prophylactic treatment,” and the like refer to reducing the probability of developing a disease, disorder, or condition in a subject, who does not have, but is at risk of or susceptible to developing a disease, disorder, or condition.

[0103] The term “probe” refers to any molecule which is capable of selectively binding to a specifically intended target molecule, for example, a nucleotide transcript or protein encoded by or corresponding to a biomarker nucleic acid. Probes can be either synthesized by one skilled in the art, or derived from appropriate biological preparations. For purposes of detection of the target molecule, probes can be specifically designed to be labeled, as described herein. Examples of molecules that can be utilized as probes include, but are not limited to, RNA, DNA, proteins, antibodies, and organic molecules.

[0104] The term “ratio” refers to a relationship between two numbers (e.g., scores, summations, and the like). Although, ratios can be expressed in a particular order (e.g., a to b or a:b), one of ordinary skill in the art will recognize that the underlying relationship between the numbers can be expressed in any order without losing the significance of the underlying relationship, although observation and correlation of trends based on the ratio can be reversed.

[0105] The term “receptor” refers to a naturally occurring molecule or complex of molecules that is generally present on the surface of cells of a target organ, tissue or cell type.

[0106] The term “cancer response,” “response to immunotherapy,” or “response to modulators of T-cell mediated cytotoxicity/immunotherapy combination therapy” relates to any response of the hyperproliferative disorder (e.g., cancer) to an cancer agent, such as a modulator of T-cell mediated cytotoxicity, and an immunotherapy, preferably to a change in tumor mass and/or volume after initiation of neoadjuvant or adjuvant therapy. Hyperproliferative disorder response can be assessed, for example for efficacy or in a neoadjuvant or adjuvant situation, where the size of a tumor after systemic intervention can be compared to the initial size and dimensions as measured by CT, PET, mammogram, ultrasound or palpation. Responses can also be assessed by caliper measurement or pathological examination of the tumor after biopsy or surgical resection. Response can be recorded in a quantitative fashion like percentage change in tumor volume or in a qualitative fashion like “pathological complete response” (pCR), “clinical complete remission” (cCR), “clinical partial remission” (cPR), “clinical stable disease” (cSD), “clinical progressive disease” (cPD) or other qualitative criteria. Assessment of hyperproliferative disorder response can be done early after the onset of neoadjuvant or adjuvant therapy, e.g., after a few hours, days, weeks or preferably after a few months. A typical endpoint for response assessment is upon termination of neoadjuvant chemotherapy or upon surgical removal of residual tumor cells and/or the tumor bed. This is typically three months after initiation of neoadjuvant therapy. In some embodiments, clinical efficacy of the therapeutic treatments described herein can be determined by measuring the clinical benefit rate (CBR). The clinical benefit rate is measured by determining the sum of the percentage of patients who are in complete remission (CR), the number of patients who are in partial remission (PR) and the number of patients having stable disease (SD) at a time point at least 6 months out from the end of therapy. The shorthand for this formula is CBR=CR+PR+SD over 6 months. In some embodiments, the CBR for a particular cancer therapeutic regimen is at least 25%, 30%, 35%, 40%, 45%, 50%, 55%, 60%, 65%, 70%, 75%, 80%, 85%, or more. Additional criteria for evaluating the response to cancer therapies are related to “survival,” which includes all of the following: survival until mortality, also known as overall survival (wherein said mortality can be either irrespective of cause or tumor related); “recurrence-free survival” (wherein the term recurrence shall include both localized and distant recurrence); metastasis free survival; disease free survival (wherein the term disease shall include cancer and diseases associated therewith). The length of said survival can be calculated by reference to a defined start point (e.g., time of diagnosis or start of treatment) and end point (e.g., death, recurrence or metastasis). In addition, criteria for efficacy of treatment can be expanded to include response to chemotherapy, probability of survival, probability of metastasis within a given time period, and probability of tumor recurrence. For example, in order to determine appropriate threshold values, a particular cancer therapeutic regimen can be administered to a population of subjects and the outcome can be correlated to biomarker measurements that were determined prior to administration of any cancer therapy. The outcome measurement can be pathologic response to therapy given in the neoadjuvant setting. Alternatively, outcome measures, such as overall survival and disease-free survival can be monitored over a period of time for subjects following cancer therapy for which biomarker measurement values are known. In certain embodiments, the doses administered are standard doses known in the art for cancer therapeutic agents. The period of time for which subjects are monitored can vary. For example, subjects can be monitored for at least 2, 4, 6, 8, 10, 12, 14, 16, 18, 20, 25, 30, 35, 40, 45, 50, 55, or 60 months. Biomarker measurement threshold values that correlate to outcome of a cancer therapy can be determined using well-known methods in the art, such as those described in the Examples section.

[0107] The term “resistance” refers to an acquired or natural resistance of a cancer sample or a mammal to a cancer therapy (i.e., being nonresponsive to or having reduced or limited response to the therapeutic treatment), such as having a reduced response to a therapeutic treatment by 5%, 10%, 15%, 20%, 25%, 30%, 35%, 40%, 45%, 50%, 55%, 60%, 65%, 70%, 75%, 80%, 85%, 90%, 95%, 100%, or more, such 2-fold, 3-fold, 4-fold, 5-fold, 10-fold, 15-fold, 20-fold or more, or any range in between, inclusive. The reduction in response can be measured by comparing with the same cancer sample or mammal before the resistance is acquired, or by comparing with a different cancer sample or a mammal that is known to have no resistance to the therapeutic treatment. A typical acquired resistance to chemotherapy is called “multidrug resistance.” The multidrug resistance can be mediated by P-glycoprotein or can be mediated by other mechanisms, or it can occur when a mammal is infected with a multi-drug-resistant microorganism or a combination of microorganisms. The determination of resistance to a therapeutic treatment is routine in the art and within the skill of an ordinarily skilled clinician, for example, can be measured by cell proliferative assays and cell death assays as described herein as “sensitizing.” In some embodiments, the term “reverses resistance” means that the use of a second agent in combination with a primary cancer therapy (e.g., chemotherapeutic or radiation therapy) is able to produce a significant decrease in tumor volume at a level of statistical significance (e.g., p<0.05) when compared to tumor volume of untreated tumor in the circumstance where the primary cancer therapy (e.g., chemotherapeutic or radiation therapy) alone is unable to produce a statistically significant decrease in tumor volume compared to tumor volume of untreated tumor. This generally applies to tumor volume measurements made at a time when the untreated tumor is growing log rhythmically.

[0108] The terms “response” or “responsiveness” refers to a cancer response, e.g., in the sense of reduction of tumor size or inhibiting tumor growth. The terms can also refer to an improved prognosis, for example, as reflected by an increased time to recurrence, which is the period to first recurrence censoring for second primary cancer as a first event or death without evidence of recurrence, or an increased overall survival, which is the period from treatment to death from any cause. To respond or to have a response means there is a beneficial endpoint attained when exposed to a stimulus. Alternatively, a negative or detrimental symptom is minimized, mitigated or attenuated on exposure to a stimulus. It will be appreciated that evaluating the likelihood that a tumor or subject will exhibit a favorable response is equivalent to evaluating the likelihood that the tumor or subject will not exhibit favorable response (i.e., will exhibit a lack of response or be non-responsive).

[0109] “RNA interference (RNAi)” is an evolutionally conserved process whereby the expression or introduction of RNA of a sequence that is identical or highly similar to a target biomarker nucleic acid results in the sequence specific degradation or specific post-transcriptional gene silencing (PTGS) of messenger RNA (mRNA) transcribed from that targeted gene (see Coburn and Cullen (2002) J. Virol. 76:9225), thereby inhibiting expression of the target biomarker nucleic acid. In one embodiment, the RNA is double stranded RNA (dsRNA). This process has been described in plants, invertebrates, and mammalian cells. In nature, RNAi is initiated by the dsRNA-specific endonuclease Dicer, which promotes processive cleavage of long dsRNA into double-stranded fragments termed siRNAs. siRNAs are incorporated into a protein complex that recognizes and cleaves target mRNAs. RNAi can also be initiated by introducing nucleic acid molecules, e.g., synthetic siRNAs or RNA interfering agents, to inhibit or silence the expression of target biomarker nucleic acids. As used herein, “inhibition of target biomarker nucleic acid expression” or “inhibition of marker gene expression” includes any decrease in expression or protein activity or level of the target biomarker nucleic acid or protein encoded by the target biomarker nucleic acid. The decrease can be of at least 30%, 40%, 50%, 60%, 70%, 80%, 90%, 95% or 99% or more as compared to the expression of a target biomarker nucleic acid or the activity or level of the protein encoded by a target biomarker nucleic acid which has not been targeted by an RNA interfering agent.

[0110] In addition to RNAi, genome editing can be used to modulate the copy number or genetic sequence of a biomarker of interest, such as constitutive or induced knockout or mutation of a biomarker of interest. For example, the CRISPR-Cas system can be used for precise editing of genomic nucleic acids (e.g., for creating non-functional or null mutations). In such embodiments, the CRISPR guide RNA and/or the Cas enzyme can be expressed. For example, a vector containing only the guide RNA can be administered to an animal or cells transgenic for the Cas9 enzyme. Similar strategies can be used (e.g., zinc finger nucleases (ZFNs), transcription activator-like effector nucleases (TALENs), or homing meganucleases (HEs), such as MegaTAL, MegaTev, Tev-mTALEN, CPF1, and the like). Such systems are well-known in the art (see, for example, U.S. Pat. No. 8,697,359; Sander and Joung (2014) Nat. Biotech. 32:347-355; Hale et al. (2009) Cell 139:945-956; Karginov and Hannon (2010) Mol. Cell 37:7; U.S. Pat. Publ. Numbers 2014/0087426 and 2012/0178169; Boch et al. (2011) Nat. Biotech. 29:135-136; Boch et al. (2009) Science 326:1509-1512; Moscou and Bogdanove (2009) Science 326:1501; Weber et al. (2011) PLoS One 6:e19722; Li et al. (2011) Nucl. Acids Res. 39:6315-6325; Zhang et al. (2011) Nat. Biotech. 29:149-153; Miller et al. (2011) Nat. Biotech. 29:143-148; Lin et al. (2014) Nucl. Acids Res. 42:e47). Such genetic strategies can use constitutive expression systems or inducible expression systems according to well-known methods in the art.

[0111] An “RNA interfering agent” as used herein, is defined as any agent which interferes with or inhibits expression of a target biomarker gene by RNA interference (RNAi). Such RNA interfering agents include, but are not limited to, nucleic acid molecules including RNA molecules which are homologous to the target biomarker gene encompassed by the present invention, or a fragment thereof, short interfering RNA (siRNA), and small molecules which interfere with or inhibit expression of a target biomarker nucleic acid by RNA interference (RNAi).

[0112] The term “sample” used for detecting or determining the presence or level of at least one biomarker is typically brain tissue, cerebrospinal fluid, whole blood, plasma, serum, saliva, urine, stool (e.g., feces), tears, and any other bodily fluid (e.g., as described above under the definition of “body fluids”), or a tissue sample (e.g., biopsy) such as a small intestine, colon sample, or surgical resection tissue. In certain instances, the method encompassed by the present invention further comprises obtaining the sample from the individual prior to detecting or determining the presence or level of at least one marker in the sample.

[0113] The term “sensitize” means to alter cancer cells or tumor cells in a way that allows for more effective treatment of the associated cancer with a cancer therapy (e.g., anti-immune checkpoint, chemotherapeutic, and/or radiation therapy). In some embodiments, normal cells are not affected to an extent that causes the normal cells to be unduly injured by the therapies. An increased sensitivity or a reduced sensitivity to a therapeutic treatment is measured according to a known method in the art for the particular treatment and methods described herein below, including, but not limited to, cell proliferative assays (Tanigawa et al. (1982) Cancer Res. 42:2159-2164) and cell death assays (Weisenthal et al. (1984) Cancer Res. 94:161-173; Weisenthal et al. (1985) Cancer Treat Rep. 69:615-632; Weisenthal et al., In: Kaspers G J L, Pieters R, Twentyman P R, Weisenthal L M, Veerman A J P, eds. Drug Resistance in Leukemia and Lymphoma. Langhorne, P A: Harwood Academic Publishers, 1993:415-432: Weisenthal (1994) Contrib. Gynecol. Obstet. 19:82-90). The sensitivity or resistance can also be measured in animal by measuring the tumor size reduction over a period of time, for example, 6 month for human and 4-6 weeks for mouse. A composition or a method sensitizes response to a therapeutic treatment if the increase in treatment sensitivity or the reduction in resistance is 5%, 10%, 15%, 20%, 25%, 30%, 35%, 40%, 45%, 50%, 55%, 60%, 65%, 70%, 75%, 80%, 85%, 90%, 95%, 100%, or more, such 2-fold, 3-fold, 4-fold, 5-fold, 10-fold, 15-fold, 20-fold or more, or any range in between, inclusive, compared to treatment sensitivity or resistance in the absence of such composition or method. The determination of sensitivity or resistance to a therapeutic treatment is routine in the art and within the skill of an ordinarily skilled clinician. It is to be understood that any method described herein for enhancing the efficacy of a cancer therapy can be equally applied to methods for sensitizing hyperproliferative or otherwise cancerous cells (e.g., resistant cells) to the cancer therapy.

[0114] “Short interfering RNA” (siRNA), also referred to herein as “small interfering RNA” is defined as an agent which functions to inhibit expression of a target biomarker nucleic acid, e.g., by RNAi. An siRNA can be chemically synthesized, can be produced by in vitro transcription, or can be produced within a host cell. In one embodiment, siRNA is a double stranded RNA (dsRNA) molecule of about 15 to about 40 nucleotides in length, preferably about 15 to about 28 nucleotides, more preferably about 19 to about 25 nucleotides in length, and more preferably about 19, 20, 21, or 22 nucleotides in length, and can contain a 3′ and/or 5′ overhang on each strand having a length of about 0, 1, 2, 3, 4, or nucleotides. The length of the overhang is independent between the two strands, i.e., the length of the overhang on one strand is not dependent on the length of the overhang on the second strand. Preferably the siRNA is capable of promoting RNA interference through degradation or specific post-transcriptional gene silencing (PTGS) of the target messenger RNA (mRNA).

[0115] In another embodiment, an siRNA is a small hairpin (also called stem loop) RNA (shRNA). In one embodiment, these shRNAs are composed of a short (e.g., 17-29 nucleotide, 19-25 nucleotide, etc. region) antisense strand, followed by a 4-10 nucleotide loop (e.g., a 4, 5, 6, 7, 8, 9, or 10 base linker region), and the analogous sense strand. Alternatively, the sense strand can precede the nucleotide loop structure and the antisense strand can follow. These shRNAs can be contained in plasmids, retroviruses, and lentiviruses and expressed from, for example, the pol III U6 promoter, or another promoter (see, e.g., Stewart, et al. (2003) RNA April; 9(4):493-501 incorporated by reference herein).

[0116] RNA interfering agents, e.g., siRNA molecules, can be administered to a patient having or at risk for having cancer, to inhibit expression of a biomarker gene which is overexpressed in cancer and thereby treat, prevent, or inhibit cancer in the subject.

[0117] The term “selective modulator” or “selectively modulate” as applied to a biologically active agent refers to the agent's ability to modulate the target, such as a cell population, signaling activity, etc. as compared to off-target cell population, signaling activity, etc. via direct or interact interaction with the target. For example, an agent that selectively inhibits the interaction between a protein and one natural binding partner over another interaction between the protein and another binding partner, and/or such interaction(s) on a cell population of interest, inhibits the interaction at least about 5%, 10%, 15%, 20%, 25%, 30%, 35%, 40%, 45%, 50%, 55%, 60%, 65%, 70%, 75%, 80%, 85%, 90%, 95%, 100%, 110%, 120%, 130%, 140%, 150%, 160%, 170%, 180%, 190%, 2× (times), 3×, 4×, 5×, 6×, 7×, 8×, 9×, 10×, 15×, 20×, 25×, 30×, 35×, 40×, 45×, 50×, 55×, 60×, 65×, 70×, 75×, 80×, 85×, 90×, 95×, 100×, 105×, 110×, 120×, 125×, 150×, 200×, 250×, 300×, 350×, 400×, 450×, 500×, 600×, 700×, 800×, 900×, 1000×, 1500×, 2000×, 2500×, 3000×, 3500×, 4000×, 4500×, 5000×, 5500×, 6000×, 6500×, 7000×, 7500×, 8000×, 8500×, 9000×, 9500×, 10000×, or greater, or any range in between, inclusive, against at least one other binding partner. Such metrics are typically expressed in terms of relative amounts of agent required to reduce the interaction/activity by half. Such metrics apply to any other selectivity arrangement, such as binding of a nucleic acid molecule to one or more target sequences.

[0118] More generally, the term “selective” refers to a preferential action or function. The term “selective” can be quantified in terms of the preferential effect in a particular target of interest relative to other targets. For example, a measured variable (e.g., modulation of biomarker expression in desired cells versus other cells, the enrichment and/or deletion of desired cells versus other cells, etc.) can be 10%, 20%, 25%, 30%, 35%, 40%, 45%, 50%, 55%, 60%, 65%, 70%, 75%, 80%, 85%, 90%, 95%, 1-fold, 1.5-fold, 2-fold, 2.5-fold, 3-fold, 3.5-fold, 4-fold, 4.5-fold, 5-fold, 5.5-fold, 6-fold, 6.5-fold, 7-fold, 7.5-fold, 8-fold, 8.5-fold, 9-fold, 9.5-fold, 10-fold, 11-fold, 12-fold, 13-fold, 14-fold, 15-fold, 16-fold, 17-fold, 18-fold, 19-fold, 20-fold, 25-fold, 30-fold, 35-fold, 40-fold, 45-fold, 50-fold, 55-fold, 60-fold, 70-fold, 80-fold, 90-fold, 100-fold, or greater or any range in between inclusive (e.g., 50% to 16-fold), different in a target of interest versus unintended or undesired targets. The same fold analysis can be used to confirm the magnitude of an effect in a given tissue, cell population, measured variable, and/or measured effect, and the like, such as cell ratios, hyperproliferative cell growth rate or volume, cell proliferation rate, etc. cell numbers, and the like.

[0119] By contrast, the term “specific” refers to an exclusionary action or function. For example, specific modulation of an interaction between a protein and one binding partner refers to the exclusive modulation of that interaction and not to any significant modulation of the interaction between the protein and another binding partner. In another example, specific binding of an antibody to a predetermined antigen refers to the ability of the antibody to bind to the antigen of interest without binding to other antigens. Typically, the antibody binds with an affinity (K_{D}) of approximately less than 1×10⁻⁷ M, such as approximately less than 10⁻⁸ M, 10⁻⁹ M, 10⁻¹⁰ M, 10⁻¹¹ M, or even lower when determined by surface plasmon resonance (SPR) technology in a BIACORE® assay instrument using an antigen of interest as the analyte and the antibody as the ligand, and binds to the predetermined antigen with an affinity that is at least 1.1, 1.2-, 1.3-, 1.4-, 1.5-, 1.6-, 1.7-, 1.8-, 1.9-, 2.0-, 2.5-, 3.0-, 3.5-, 4.0-, 4.5-, 5.0-, 6.0-, 7.0-, 8.0-, 9.0-, or 10.0-fold or greater than its affinity for binding to a non-specific antigen (e.g., BSA, casein) other than the predetermined antigen or a closely-related antigen. In addition, K_{D} is the inverse of KA. The phrases “an antibody recognizing an antigen” and “an antibody specific for an antigen” are used interchangeably herein with the term “an antibody which binds specifically to an antigen.”

[0120] The term “small molecule” is a term of the art and includes molecules that are less than about 1000 molecular weight or less than about 500 molecular weight. In one embodiment, small molecules do not exclusively comprise peptide bonds. In another embodiment, small molecules are not oligomeric. Exemplary small molecule compounds which can be screened for activity include, but are not limited to, peptides, peptidomimetics, nucleic acids, carbohydrates, small organic molecules (e.g., polyketides) (Cane et al. (1998) Science 282:63), and natural product extract libraries. In another embodiment, the compounds are small, organic non-peptidic compounds. The term is intended to encompass all stereoisomers, geometric isomers, tautomers, and isotopes of a chemical structure of interest, unless otherwise indicated.

[0121] The term “subject” refers to an animal, vertebrate, mammal, or human, especially one to whom an agent is administered, e.g., for experimental, diagnostic, and/or therapeutic purposes, or from whom a sample is obtained or on whom a procedure is performed. In some embodiments, a subject is a mammal, e.g., a human, non-human primate, rodent (e.g., mouse or rat), domesticated animals (e.g., cows, sheep, cats, dogs, and horses), or other animals, such as llamas and camels. In some embodiments, the subject is human. In some embodiments, the subject is a human subject with a cancer. The term “subject” is interchangeable with “patient.”

[0122] The term “survival” includes all of the following: survival until mortality, also known as overall survival (wherein said mortality can be either irrespective of cause or tumor related); “recurrence-free survival” (wherein the term recurrence shall include both localized and distant recurrence); metastasis free survival; disease free survival (wherein the term disease shall include cancer and diseases associated therewith). The length of said survival can be calculated by reference to a defined start point (e.g., time of diagnosis or start of treatment) and end point (e.g., death, recurrence or metastasis). In addition, criteria for efficacy of treatment can be expanded to include response to chemotherapy, probability of survival, probability of metastasis within a given time period, and probability of tumor recurrence.

[0123] The term “synergistic effect” refers to the combined effect of two or more agents (e.g., a modulator of biomarkers listed in Table 1 and/or Table 2 and immunotherapy combination therapy) that is greater than the sum of the separate effects of the cancer agents/therapies alone.

[0124] The term “target” refers to a gene or gene product that is modulated, inhibited, or silenced by an agent, composition, and/or formulation described herein. A target gene or gene product includes wild-type and mutant forms. Non-limiting, representative lists of targets encompassed by the present invention are provided in Table 1 and Table 2. Similarly, the term “target”, “targets”, or “targeting” used as a verb refers to modulating the activity of a target gene or gene product. Targeting can refer to upregulating or downregulating the activity of a target gene or gene product.

[0125] The term “therapeutic effect” encompasses a local or systemic effect in animals, particularly mammals, and more particularly humans, caused by a pharmacologically active substance. The term thus means any substance intended for use in the diagnosis, cure, mitigation, treatment, or prevention of disease or in the enhancement of desirable physical or mental development and conditions in an animal or human. A prophylactic effect encompassed by the term encompasses delaying or eliminating the appearance of a disease or condition, delaying or eliminating the onset of symptoms of a disease or condition, slowing, halting, or reversing the progression of a disease or condition, or any combination thereof.

[0126] The term “effective amount” or “effective dose” of an agent (including a composition and/or formulation comprising such an agent) refers to the amount sufficient to achieve a desired biological and/or pharmacological effect, e.g., when delivered to a cell or organism according to a selected administration form, route, and/or schedule. As will be appreciated by those of ordinary skill in this art, the absolute amount of a particular agent or composition that is effective can vary depending on such factors as the desired biological or pharmacological endpoint, the agent to be delivered, the target tissue, etc. Those of ordinary skill in the art will further understand that an “effective amount” can be contacted with cells or administered to a subject in a single dose, or through use of multiple doses, in various embodiments. The term “effective amount” can be a “therapeutically effective amount.”

[0127] The terms “therapeutically effective amount” refers to that amount of an agent that is effective for producing some desired therapeutic effect in at least a sub-population of cells in an animal at a reasonable benefit/risk ratio applicable to any medical treatment. Toxicity and therapeutic efficacy of subject compounds can be determined by standard pharmaceutical procedures in cell cultures or experimental animals, e.g., for determining the LD₅₀ and the ED₅₀. Compositions that exhibit large therapeutic indices are preferred. In some embodiments, the LD₅₀ (lethal dosage) can be measured and can be, for example, at least 10%, 20%, 30%, 40%, 50%, 60%, 70%, 80%, 90%, 100%, 200%, 300%, 400%, 500%, 600%, 700%, 800%, 900%, 1000% or more reduced for the agent relative to no administration of the agent. Similarly, the ED₅₀ (i.e., the concentration which achieves a half-maximal inhibition of symptoms) can be measured and can be, for example, at least 10%, 20%, 30%, 40%, 50%, 60%, 70%, 80%, 90%, 100%, 200%, 300%, 400%, 500%, 600%, 700%, 800%, 900%, 1000% or more increased for the agent relative to no administration of the agent. Also, Similarly, the ED₅₀ (i.e., the concentration which achieves half-maximal cytotoxic or cytostatic effect on cancer cells) can be measured and can be, for example, at least 10%, 20%, 30%, 400%, 50%, 60%, 70%, 80%, 90%, 100%, 200N, 300%, 400%, 500%, 600%, 700%, 800%, 900%, 1000% or more increased for the agent relative to no administration of the agent. In some embodiments, cancer cell growth in an assay can be inhibited by at least about 10%, 15%, 20, 25%, 30%, 35%, 40%, 45%, 50%, 55%, 60%, 65%, 70%, 75%, 80%, 85%, 90%, 95%, or even 100%. In another embodiment, at least about a 10%, 15%, 20%, 25%, 30%, 35%, 40%, 45%, 50%, 55%, 60%, 65%, 70%, 75%, 80%, 85%, 90%, 95%, or even 100% decrease in a solid malignancy can be achieved.

[0128] The term “tolerance” or “unresponsiveness” includes refractivity of cells, such as immune cells, to stimulation, e.g., stimulation via an activating receptor or a cytokine. Unresponsiveness can occur, e.g., because of exposure to immunosuppressants or exposure to high doses of antigen. Several independent methods can induce tolerance. One mechanism is referred to as “anergy,” which is defined as a state where cells persist in vivo as unresponsive cells rather than differentiating into cells having effector functions. Such refractivity is generally antigen-specific and persists after exposure to the tolerizing antigen has ceased. For example, anergy in T cells is characterized by lack of cytokine production, e.g., IL-2. T cell anergy occurs when T cells are exposed to antigen and receive a first signal (a T cell receptor or CD-3 mediated signal) in the absence of a second signal (a costimulatory signal). Under these conditions, reexposure of the cells to the same antigen (even if reexposure occurs in the presence of a costimulatory polypeptide) results in failure to produce cytokines and, thus, failure to proliferate. Anergic T cells can, however, proliferate if cultured with cytokines (e.g., IL-2). For example, T cell anergy can also be observed by the lack of IL-2 production by T lymphocytes as measured by ELISA or by a proliferation assay using an indicator cell line. Alternatively, a reporter gene construct can be used. For example, anergic T cells fail to initiate IL-2 gene transcription induced by a heterologous promoter under the control of the 5′ IL-2 gene enhancer or by a multimer of the AP1 sequence that can be found within the enhancer (Kang et al. (1992) Science 257:1134). Another mechanism is referred to as “exhaustion.” T cell exhaustion is a state of T cell dysfunction that arises during many chronic infections and cancer. It is defined by poor effector function, sustained expression of inhibitory receptors and a transcriptional state distinct from that of functional effector or memory T cells.

[0129] A “transcribed polynucleotide” or “nucleotide transcript” is a polynucleotide (e.g., an mRNA, hnRNA, a cDNA, or an analog of such RNA or cDNA) which is complementary to or homologous with all or a portion of a mature mRNA made by transcription of a biomarker nucleic acid and normal post-transcriptional processing (e.g., splicing), if any, of the RNA transcript, and reverse transcription of the RNA transcript.

[0130] The term “treat” refers to the therapeutic management or improvement of a condition (e.g, a disease or disorder) of interest. Treatment can include, but is not limited to, administering an agent or composition (e.g., a pharmaceutical composition) to a subject. Treatment is typically undertaken in an effort to alter the course of a disease (which term is used to indicate any disease, disorder, syndrome or undesirable condition warranting or potentially warranting therapy) in a manner beneficial to the subject. The effect of treatment can include reversing, alleviating, reducing severity of, delaying the onset of, curing, inhibiting the progression of, and/or reducing the likelihood of occurrence or recurrence of the disease or one or more symptoms or manifestations of the disease. Desirable effects of treatment include, but are not limited to, preventing occurrence or recurrence of disease, alleviation of symptoms, diminishment of any direct or indirect pathological consequences of the disease, preventing metastasis, decreasing the rate of disease progression, amelioration or palliation of the disease state, and remission or improved prognosis. A therapeutic agent can be administered to a subject who has a disease or is at increased risk of developing a disease relative to a member of the general population. In some embodiments, a therapeutic agent can be administered to a subject who has had a disease but no longer shows evidence of the disease. The agent can be administered e.g., to reduce the likelihood of recurrence of evident disease. A therapeutic agent can be administered prophylactically, i.e., before development of any symptom or manifestation of a disease. “Prophylactic treatment” refers to providing medical and/or surgical management to a subject who has not developed a disease or does not show evidence of a disease in order, e.g., to reduce the likelihood that the disease will occur or to reduce the severity of the disease should it occur. The subject can have been identified as being at risk of developing the disease (e.g., at increased risk relative to the general population or as having a risk factor that increases the likelihood of developing the disease.

[0131] The term “unresponsiveness” includes refractivity of cancer cells to therapy or refractivity of therapeutic cells, such as immune cells, to stimulation, e.g., stimulation via an activating receptor or a cytokine. Unresponsiveness can occur, e.g., because of exposure to immunosuppressants or exposure to high doses of antigen. As used herein, the term “anergy” or “tolerance” includes refractivity to activating receptor-mediated stimulation. Such refractivity is generally antigen-specific and persists after exposure to the tolerizing antigen has ceased. For example, anergy in T cells (as opposed to unresponsiveness) is characterized by lack of cytokine production, e.g, IL-2. T cell anergy occurs when T cells are exposed to antigen and receive a first signal (a T cell receptor or CD-3 mediated signal) in the absence of a second signal (a costimulatory signal). Under these conditions, reexposure of the cells to the same antigen (even if reexposure occurs in the presence of a costimulatory polypeptide) results in failure to produce cytokines and, thus, failure to proliferate. Anergic T cells can, however, proliferate if cultured with cytokines (e.g., IL-2). For example, T cell anergy can also be observed by the lack of IL-2 production by T lymphocytes as measured by ELISA or by a proliferation assay using an indicator cell line. Alternatively, a reporter gene construct can be used. For example, anergic T cells fail to initiate IL-2 gene transcription induced by a heterologous promoter under the control of the 5′ IL-2 gene enhancer or by a multimer of the API sequence that can be found within the enhancer (Kang et al. (1992) Science 257:1134).

[0132] The term “vaccine” refers to a composition for generating immunity for the prophylaxis and/or treatment of diseases.

[0133] In addition, there is a known and definite correspondence between the amino acid sequence of a particular protein and the nucleotide sequences that can code for the protein, as defined by the genetic code (shown below). Likewise, there is a known and definite correspondence between the nucleotide sequence of a particular nucleic acid and the amino acid sequence encoded by that nucleic acid, as defined by the genetic code.

GENETIC CODE

| | |
|---|---|
| Alanine (Ala, A) | GCA, GCC, GCG, GCT |
| Arginine (Arg, R) | AGA, ACG, CGA, CGC, |
| | CGG, CGT |
| Asparagine (Asn, N) | AAC, AAT |
| Aspartic acid (Asp, D) | GAC, GAT |
| Cysteine (Cys, C) | TGC, TGT |
| Glutamic acid (Glu, E) | GAA, GAG |
| Glutamine (Gln, Q) | CAA, CAG |
| Glycine (Gly, G) | GGA, GGC, GGG, GGT |
| Histidine (His, H) | CAC, CAT |
| Isoleucine (Ile, I) | ATA, ATC, ATT |
| Leucine (Leu, L) | CTA, CTC, CTG, CTT, |
| | TTA, TTG |
| Lysine (Lys, K) | AAA, AAG |
| Methionine (Met, M) | ATG |
| Phenylalanine (Phe, F) | TTC, TTT |
| Proline (Pro, P) | CCA, CCC, CCG, CCT |
| Serine (Ser, S) | AGC, AGT, TCA, TCC, |
| | TCG, TCT |
| Threonine (Thr, T) | ACA, ACC, ACG, ACT |
| Tryptophan (Trp, W) | TGG |
| Tyrosine (Tyr, Y) | TAC, TAT |
| Valine (Val, V) | GTA, GTC, GTG, GTT |
| Termination signal | TAA, TAG, TGA |
| (end) | |

[0134] An important and well-known feature of the genetic code is its redundancy, whereby, for most of the amino acids used to make proteins, more than one coding nucleotide triplet can be employed (illustrated above). Therefore, a number of different nucleotide sequences can code for a given amino acid sequence. Such nucleotide sequences are considered functionally equivalent since they result in the production of the same amino acid sequence in all organisms (although certain organisms can translate some sequences more efficiently than they do others). Moreover, occasionally, a methylated variant of a purine or pyrimidine can be found in a given nucleotide sequence. Such methylations do not affect the coding relationship between the trinucleotide codon and the corresponding amino acid.

[0135] In view of the foregoing, the nucleotide sequence of a DNA or RNA encoding a biomarker nucleic acid (or any portion thereof) can be used to derive the polypeptide amino acid sequence, using the genetic code to translate the DNA or RNA into an amino acid sequence. Likewise, for polypeptide amino acid sequence, corresponding nucleotide sequences that can encode the polypeptide can be deduced from the genetic code (which, because of its redundancy, will produce multiple nucleic acid sequences for any given amino acid sequence). Thus, description and/or disclosure herein of a nucleotide sequence which encodes a polypeptide should be considered to also include description and/or disclosure of the amino acid sequence encoded by the nucleotide sequence. Similarly, description and/or disclosure of a polypeptide amino acid sequence herein should be considered to also include description and/or disclosure of all possible nucleotide sequences that can encode the amino acid sequence.

### II. Monocytes and Macrophages

[0136] Monocytes are myeloid-derived immune effector cells that circulate in the blood, bone marrow, and spleen and have limited proliferation in a steady state condition. The term “myeloid cells” can refer to a granulocyte or monocyte precursor cell in bone marrow or spinal cord, or a resemblance to those found in the bone marrow or spinal cord. The myeloid cell lineage includes circulating monocytic cells in the peripheral blood and the cell populations that they become following maturation, differentiation, and/or activation. These populations include non-terminally differentiated myeloid cells, myeloid derived suppressor cells, and differentiated macrophages. Differentiated macrophages include non-polarized and polarized macrophages, resting and activated macrophages. Without being limiting, the myeloid lineage can also include granulocytic precursors, polymorphonuclear derived suppressor cells, differentiated polymorphonuclear white blood cells, neutrophils, granulocytes, basophils, eosinophils, monocytes, macrophages, microglia, myeloid derived suppressor cells, dendritic cells and erythrocytes. Monocytes are found among peripheral blood mononuclear cells (PBMCs), which also comprise other hematopoietic and immune cells, such as B cells, T cells, NK cells, and the like. Monocytes are produced by the bone marrow from hematopoietic stem cell precursors called monoblasts. Monocytes have two main functions in the immune system: (1) they can exit the bloodstream to replenish resident macrophages and dendritic cells (DCs) under normal states, and (2) they can quickly migrate to sites of infection in the tissues and divide/differentiate into macrophages and inflammatory dendritic cells to elicit an immune response in response to inflammation signals. Monocytes are usually identified in stained smears by their large bilobate nucleus. Monocytes also express chemokine receptors and pathogen recognition receptors that mediate migration from blood to tissues during infection. They produce inflammatory cytokines and phagocytose cells. In some embodiments, monocytes and/or macrophages of interest are identified according to CD11b+ expression and/or CD14+ expression.

[0137] As described in detail below, monocytes can differentiate into macrophages. Monocytes can also differentiate into dendritic cells, such as through the action of the cytokines granulocyte macrophage colony-stimulating factor (GM-CSF) and interleukin 4 (IL-4). In general, the term “monocytes” encompasses undifferentiated monocytes, as well as cell types that are differentiated therefrom, including macrophages and dendritic cells. In some embodiments, the term “monocytes” can refer to undifferentiated monocytes.

[0138] Macrophages are critical immune effectors and regulators of inflammation and the innate immune response. Macrophages are heterogeneous, tissue-resident, terminally-differentiated, innate myeloid cells, which have remarkable plasticity and can change their physiology in response to local cues from the microenvironment and can assume a spectrum of functional requirements from host defense to tissue homeostasis (Ginhoux et al. (2016) Nat. Immunol. 17:34-40). Macrophages are present in virtually all tissues in the body. They are either tissue resident macrophages, for example Kupffer cells that reside in liver, or derived from circulating monocytic precursors (i.e., monocytes) which mainly originate from bone marrow and spleen reservoirs and migrate into tissue in the steady state or in response to inflammation or other stimulating cues. For example, monocytes can be recruited from the blood to tissue to replenish tissue specific macrophages of the bone, alveoli (lung), central nervous system, connective tissues, gastrointestinal tract, live, spleen and peritoneum.

[0139] The term “tissue-resident macrophages” refers to a heterogeneous populations of immune cells that fulfill tissue-specific and/or micro-anatomical niche-specific functions such as tissue immune-surveillance, response to infection and the resolution of inflammation, and dedicated homeostatic functions. Tissue resident macrophages originate in the yolk sac of the embryo and mature in one particular tissue in the developing fetus, where they acquire tissue-specific roles and change their gene expression profile. Local proliferation of tissue resident macrophages, which maintain colony-forming capacity, can directly give rise to populations of mature macrophages in the tissue. Tissue resident macrophages can also be identified and named according to the tissues they occupy. For example, adipose tissue macrophages occupy adipose tissue, Kupffer cells occupy liver tissue, sinus histiocytes occupy lymph nodes, alveolar macrophages (dust cells) occupy pulmonary alveoli, Langerhans cells occupy skin and mucosal tissue, histiocytes leading to giant cells occupy connective tissue, microglia occupy central nervous system (CNS) tissue, Hofbauer cells occupy placental tissue, intraglomerular mesangial cells occupy kidney tissue, osteoclasts occupy bone tissue, epithelioid cells occupy granulomas, red pulp macrophages (sinusoidal lining cells) occupy the red pulp of spleen tissue, peritoneal cavity macrophages occupy peritoneal cavity tissue, lysomac cells occupy Peyer's patch tissue, and pancreatic macrophages occupy pancreatic tissue.

[0140] Macrophages, in addition to host defense against infectious agents and other inflammation reaction, can perform different homeostatic functions, including but not limited to, development, wound healing and tissue repairing, and regulation of immune response. Macrophages, first recognized as phagocytosis cells in the body which defend infections through phagocytosis, are essential components of innate immunity. In response to pathogens and other inflammation stimuli, activated macrophages can engulf infected bacteria and other microbes; stimulate inflammation and release a cocktail of pro-inflammatory molecules to these intracellular microorganisms. After engulfing the pathogens, macrophages present pathogenic antigens to T cells to further activate adaptive immune response for defense. Exemplary pro-inflammatory molecules include cytokines IL-1β, IL-6 and TNF-α, chemokine MCP-1, CXC-5 and CXC-6, and CD40L.

[0141] In addition to their contribution to host defense against infections, macrophages play vital homeostatic roles, independent of their involvement in immune responses. Macrophages are prodigious phagocytic cells that clear erythrocytes and the released substances such as iron and hemoglobin can be recycled for the host to reuse. This clearance process is a vital metabolic contribution without which the host would not survive.

[0142] Macrophages are also involved in the removal of cellular debris that is generated during tissue remodeling, and rapidly and efficiently clear cells that have undergone apoptosis. Macrophages are believed to be involved in steady-state tissue homeostasis via the clearance of apoptotic cells. These homeostatic clearance processes are generally mediated by surface receptors on macrophages including scavenger receptors, phosphatidyl serine receptors, the thrombospondin receptor, integrins and complement receptors. These receptors that mediate phagocytosis either fail to transduce signals that induce cytokine-gene transcription or actively produce inhibitory signals and/or cytokines. The homeostatic function of macrophages is independent of other immune cells.

[0143] Macrophages can also clear cellular debris/necrotic cells that results from trauma or other damages to cells. Macrophages detect the endogenous danger signals that are present in the debris of necrotic cells through toll-like receptors (TLRs), intracellular pattern-recognition receptors and the interleukin-1 receptor (IL-IR), most of which signal through the adaptor molecule myeloid differentiation primary-response gene 88 (MyD88). The clearance of cellular debris can markedly alter the physiology of macrophages. Macrophages that clear necrosis can undergo dramatic changes in their physiology, including alterations in the expression of surface proteins and the production of cytokines and pro-inflammatory mediators. The alterations in macrophage surface-protein expression in response to these stimuli could potentially be used to identify biochemical markers that are unique to these altered cells.

[0144] Macrophages have important functions in maintaining homeostasis in many tissues such as white adipose tissue, brown adipose tissue, liver and pancreas. Tissue macrophages can quickly respond to changing conditions in a tissue, by releasing cell signaling molecules that trigger a cascade of changes allowing tissue cells to adapt. For instance, macrophages in adipose tissue regulate the production of new fat cells in response to changes in diet (e.g., macrophages in white adipose tissue) or exposure to cold temperatures (e.g., macrophages in brown adipose tissue). Macrophages in the liver, known as Kupffer cells, regulate the breakdown of glucose and lipids in response to dietary changes. Macrophages in pancreas can regulate insulin production in response to high fat diet.

[0145] Macrophages can also contribute to wound healing and tissue repair. For example, macrophages, in response to signals derived from injured tissues and cells, can be activated and induce a tissue-repair response to repair damaged tissue (Minutti et al. (2017) Science 356:1076-1080).

[0146] During embryonic development, macrophages also play a key role in tissue remodeling and organ development. For example, resident macrophages actively shape the development of blood vessels in neonatal mouse hearts (Leid et al. (2016) Circ. Res. 118:1498-1511). Microglia in the brain can produce growth factors that guide neurons and blood vessels in developing brain during embryonic development. Similarly, CD95L, a macrophage-produced protein, binds to CD95 receptors on the surface of neurons and developing blood vessels in the brains of mouse embryos and increases neuron and blood vessel development (Chen et al. (2017) Cell Rep. 19:1378-1393). Without the ligand, neurons branch less frequently, and the resulting adult brain exhibits less electrical activity Monocyte-derived cells known as osteoclasts are involved in bone development, and mice that lack these cells develop dense, hardened bones—a rare condition known as osteopetrosis. Macrophages also orchestrate development of the mammary gland and assist in retinal development in the early postnatal period (Wynn et al. (2013) Nature 496:445-455).

[0147] As described above, macrophages regulate immune systems. In addition to the presentation of antigens to T cells, macrophages can provide immunosuppressive/inhibitory signals to immune cells in some conditions. For example, in the testis, macrophages help create a protective environment for sperm from being attacked by the immune system. Tissue resident macrophages in the testis produce immunosuppressant molecules that prevent immune cell reaction against sperm (Mossadegh-Keller et al. (2017) J. Ep. Med. 214:10.1084/jem.20170829).

[0148] The plasticity of macrophages in response to different environment signals and in agreement with their functional requirements has resulted in a spectrum of macrophage activation states, including two extremes of the continuum, namely “classically activated” M1 and “alternatively activated” M2 macrophages.

[0149] The term “activation” refers to the state of a monocyte and/or macrophage that has been sufficiently stimulated to induce detectable cellular proliferation and/or has been stimulated to exert its effector function, such as induced cytokine expression and secretion, phagocytosis, cell signaling, antigen processing and presentation, target cell killing, and pro-inflammatory function.

[0150] The term “M1 macrophages” or “classically activated macrophages” refers to macrophages having a pro-inflammatory phenotype. The term “macrophage activation” (also referred to as “classical activation”) was introduced by Mackaness in the 1960s in an infection context to describe the antigen-dependent, but non-specific enhanced, microbicidal activity of macrophages toward BCG (bacillus Calmette-Guerin) and Listeria upon secondary exposure to the pathogens (Mackaness (1962). Exp. Med. 116:381-406). The enhancement was later linked with Thl responses and IFN-γ production by antigen-activated immune cells (Nathan et al. (1983) J. Exp. Med. 158:670-689) and extended to cytotoxic and antitumoral properties (Pace et al. (1983) Proc. Nat. Acad. Sci. U.S.A. 80:3782-3786; Celada et al. (1984) J. Exp. Med 160:55-74). Therefore, any macrophage functionality that enhances inflammation by cytokine secretion, antigen presentation, phagocytosis, cell-cell interactions, migration, etc. is considered pro-inflammatory., vitro and in vivo assays can measure different endpoints: general in vitro measurements include pro-inflammatory cell stimulation as measured by proliferation, migration, pro-inflammatory Th1 cytokine/chemokine secretion and/or migration, while general in vivo measurements further include analyzing pathogen fighting, tissue injury immediate responders, other cell activators, migration inducers, etc. For both in vitro and in vivo, pro-inflammatory antigen presentation can be assessed. Bacterial moieties, such as lipopolysaccharide (LPS), certain Toll-like receptor (TLR) agonists, the Th1 cytokine interferon-gamma (IFNγ) (e.g., IFNγ produced by NK cells in response to stress and infections, and T helper cells with sustained production) and TNF polarize macrophages along the M1 pathway. Activated M1 macrophages phagocytose and destroy microbes, eliminate damaged cells (e.g., tumor cells and apoptotic cells), present antigen to T cells for increasing adaptive immune responses, and produce high levels of pro-inflammatory cytokines (e.g., IL-1, IL-6, and IL-23), reactive oxygen species (ROS), and nitric oxide (NO), as well as activate other immune and non-immune cells. Characterized by their expression of inducible nitric oxide synthase (iNOS), reactive oxygen species (ROS), and production of the Th1-associated cytokine, IL-12, M1 macrophages are well-adapted to promote a strong immune response. The metabolism of M1 macrophages is characterized by enhanced aerobic glycolysis, converting glucose into lactate, increased flux through the pentose phosphate pathway (PPP), fatty acid synthesis, and a truncated tricarboxylic acid (TCA) cycle, leading to accumulation of succinate and citrate.

[0151] A “Type 1” or “M1-like” monocyte and/or macrophage is a monocyte and/or macrophage capable of contributing to a pro-inflammatory response that is characterized by at least one of the following: producing inflammatory stimuli by secreting at least one pro-inflammatory cytokine, expressing at least one cell surface activating molecule/a ligand for an activating molecule on its surface, recruiting/instructing/interacting with at least one other cell (including other macrophages and/or T cells) to stimulate pro-inflammatory responses, presenting antigen in a pro-inflammatory context, migrating to the site allowing for pro-inflammatory response initiation or starting to express at least one gene that is expected to lead to pro-inflammatory functionality. In some embodiments, the term includes activating cytotoxic CD8+ T cells, mediating increased sensitivity of cancer cells to immunotherapy, such as immune checkpoint therapy, and/or mediating reversal of cancer cells to resistance. In certain embodiments, such modulation toward a pro-inflammatory state can be measured in a number of well-known manners, including, without limitation, one or more of a) increased cluster of differentiation 80 (CD80), CD86, MHCII, MHCI, interleukin 1-beta (IL-1β, IL-6, CCL3, CCL4, CXCL10, CXCL9, GM-CSF and/or tumor necrosis factor alpha (TNF-α); b) decreased expression and/or secretion of CD206, CD163, CD16, CD53, VSIG4, PSGL-1, TGFb and/or IL-10; c) increased secretion of at least one cytokine or chemokine selected from the group consisting of IL-1β, TNF-α, IL-12, IL-18, GM-CSF, CCL3, CCL4, and IL-23; d) increased ratio of expression of IL-1β, IL-6, and/or TNF-α to expression of IL-10; e) increased CD8+ cytotoxic T cell activation; f) increased recruitment of CD8+ cytotoxic T cell activation; g) increased CD4+ helper T cell activity; h) increased recruitment of CD4+ helper T cell activity; i) increased NK cell activity; j) increased recruitment of NK cell; k) increased neutrophil activity; 1) increased macrophage activity; and/or m) increased spindle-shaped morphology, flatness of appearance, and/or number of dendrites, as assessed by microscopy.

[0152] In cells that are already pro-inflammatory, an increased inflammatory phenotype refers to an even more pro-inflammatory state.

[0153] By contrast, the term “M2 macrophages” refers to macrophages having an anti-inflammatory phenotype. Th2- and tumor-derived cytokines, such as IL-4, IL-10, IL-13, transforming growth factor beta (TGF-β), or prostaglandin E2 (PGE2) can promulgate M2 polarization. The metabolic profile of M2 macrophages is defined by OXPHOS, FAO, a decreased glycolysis, and PPP. The discovery that the mannose receptor was selectively enhanced by the Th2 IL-4 and IL-13 in murine macrophages, and induced high endocytic clearance of mannosylated ligands, increased major histocompatibility complex (MHC) class II antigen expression, and reduced pro-inflammatory cytokine secretion, led Stein, Doyle, and colleagues to propose that IL-4 and IL-13 induced an alternative activation phenotype, a state altogether different from IFN-γ activation but far from deactivation (Martinez and Gordon (2014) F1000 Prime Reports 6:13). In vitro and in vivo definition/assays can measure different endpoints: general in vitro endpoints include anti-inflammatory cell stimulation measured by proliferation, migration, anti-inflammatory Th2 cytokine/chemokine secretion and/or migration, while general in vivo M2 endpoints further include analyzing pathogen fighting, tissue injury delayed/pro-fibrotic response, other cell Th2 polarization, migration inducers, etc. For both in vitro and in vivo, pro-tolerogenic antigen presentation can be assessed.

[0154] A “Type 2” or “M2-like” monocyte and/or macrophage is a monocyte and/or macrophage capable of contributing to an anti-inflammatory response that is characterized by at least one of the following: producing anti-inflammatory stimuli by secreting at least one anti-inflammatory cytokine, expressing at least one cell surface inhibiting molecule/ligand for an inhibitory molecule on its surface, recruiting/instructing/interacting at least one other cell to stimulate anti-inflammatory responses, presenting antigen in a pro-tolerogenic context, migrating to the site allowing for pro-tolerogenic response initiation or starting to express at least one gene that is expected to lead to pro-tolerogenic/anti-inflammatory functionality. In certain embodiments, such modulation toward a pro-inflammatory state can be measured in a number of well-known manners, including, without limitation, the opposite of the Type 1 pro-inflammatory state measurements described above.

[0155] A cell that has an “increased inflammatory phenotype” is one that has a more pro-inflammatory response capacity related to a) an increase in one or more of the Type 1 listed-criteria and/or b) a decrease in one or more of the Type 2-listed criteria, after modulation of at least one biomarker (e.g., at least one target listed in Table 1 and/or Table 2) of the present invention, such as contact by an agent that modulates the at least one biomarker (e.g., at least one target listed in Table 1 and/or Table 2) of the present invention.

[0156] A cell that has a “decreased inflammatory phenotype” is one that has a more anti-inflammatory response capacity related to a) an decrease in one or more of the Type 1 listed-criteria and/or b) an increase of one or more of the Type 2-listed criteria, after modulation of at least one biomarker (e.g., at least one target listed in Table 1 and/or Table 2) of the present invention, such as contact by an agent that modulates the at least one biomarker (e.g., at least one target listed in Table 1 and/or Table 2) of the present invention.

[0157] Thus, macrophages can adopt a continuum of alternatively activated states with intermediate phenotypes between the Type 1 and Type 2 states (see, e.g., Biswas et al. (2010) Nat. Immunol. 11: 889-896; Mosser and Edwards (2008) Nat. Rev. Immunol. 8:958-969; Mantovani et al. (2009) Hum. Immunol. 70:325-330) and such increased or decreased inflammatory phenotypes can be determined as described above.

[0158] As used herein, the term “alternatively activated macrophages” or “alternatively activated states” refers to essentially all types of macrophage populations other than the classically activated M1 pro-inflammatory macrophages. Originally, the alternatively activated state was designated only to M2 type anti-inflammatory macrophages. The term has expanded to include all other alternative activation states of macrophages with dramatic difference in their biochemistry, physiology and functionality.

[0159] For example, one type of alternatively activated macrophages is those involved in wound healing. In response to innate and adaptive signals released during tissue injury (e.g., surgical wound), such as IL-4 produced by basophils and mast cells, tissue-resident macrophages can be activated to promote wound healing. The wound healing macrophages, instead of producing high levels of pro-inflammatory cytokines, secret large amounts of extracellular matrix components, e.g., chitinase and chitinase-like proteins YM1/CHI3L3, YM2, AMCase and Stabilin, all of which exhibit carbohydrate and matrix-binding activities and involve in tissue repair.

[0160] Another example of alternatively activated macrophages involves regulatory macrophages that can be induced by innate and adaptive immune response. Regulatory macrophages can contribute to immuno-regulatory function. For example, macrophages can respond to hormones from the hypothalamic-pituitary-adrenal (HPA) axis (e.g., glucocorticoids) to adopt a state with inhibited host defense and inflammatory function such as inhibition of the transcriptions of pro-inflammatory cytokines. Regulatory macrophages can produce regulatory cytokine TGF-P to dampen immune responses in certain conditions, for instance, at late stage of adaptive immune response. Many regulatory macrophages can express high levels of co-stimulatory molecules (e.g., CD80 and CD86) and therefore enhance antigen presentation to T cells.

[0161] Many stimuli/cues can induce polarization of regulatory macrophages. The cues can include, but are not limited to, the combination of TLR agonist and immune complexes, apoptotic cells, IL-10, prostaglandins, GPcR ligands, adenosine, dopamine, histamine, sphingosine1-phosphate, melanocortin, vasoactive intestinal peptides and Siglec-9. Some pathogens, such as parasites, viruses, and bacteria, can specifically induce the differentiation of regulatory macrophages, resulting in defective pathogen killing and enhanced survival and spread of the infected microorganisms.

[0162] Regulatory macrophages share some common features. For example, regulatory macrophages need two stimuli to induce their anti-inflammatory activity. Differences among the regulatory macrophage subpopulations that are induced by different cues/stimuli are also observed, reflecting their heterogeneity.

[0163] Regulatory macrophages also are a heterogeneous population of macrophages, including a variety of subpopulations found in metabolism, during development, in the maintenance of homeostasis. In one example, a subpopulation of alternatively activated macrophages are immunoregulatory macrophages with unique immunoregulatory properties which can be induced in the presence of M-CSF/GM-CSF, a CD16 ligand (such as an immunoglobulin), and IFN-γ (PCT application publication NO. WO2017/153607).

[0164] Macrophages in a tissue can change their activation states in vivo over time. This dynamic reflects constant influx of migrating macrophages to the tissue, dynamic changes of activated macrophages, and macrophages that switch back the rest state. In some conditions, different signals in an environment can induce macrophages to a mix of different activation states. For example, in a condition with chronic wound, macrophages over time, can include pro-inflammatory activation subpopulation, macrophages that are pro-wound healing, and macrophages that exhibit some pro-resolving activities. Under non-pathological conditions, a balanced population of immune-stimulatory and immune-regulatory macrophages exist in the immune system. In some disease conditions, the balance is interrupted and the imbalance causes many clinical conditions.

[0165] The apparent plasticity of macrophages also make them vulnerably responsive to environmental cues they receive in a disease condition. Macrophages can be repolarized in response to a variety of disease conditions, demonstrating distinct characteristics. One example is macrophages that are attracted and filtrate into tumor tissues from peripheral blood monocytes, which are often called “tumor associated macrophages” (“TAMs”) or “tumor infiltrating macrophages” (“TIMs”). Tumor-associated macrophages are amongst the most abundant inflammatory cells in tumors and a significant correlation was found between high TAM density and a worse prognosis for most cancers (Zhang et al. (2012) PloS One 7:e50946.10.1371/journal.pone.0050946).

[0166] TAMs are a mixed population of both M1-like pro-inflammatory and M2-like anti-inflammatory subpopulations. In the earliest stage of neoplasia, classically activated macrophages that have a pro-inflammatory phenotype are present in the normoxic tumor regions, are believed to contribute to early eradication of transformed tumor cells. However, as a tumor grows and progresses, the majority of TAMs in late stage tumors is M2-like regulatory macrophages that reside in the hypoxic regions of the tumor. This phenotypic change of macrophages is markedly influenced by the tumor microenvironmental stimuli, such as tumor extracellular matrix, anoxic environment and cytokines secreted by tumor cells. The M2-like TAMs demonstrate a hybrid activation state of wound healing macrophages and regulatory macrophages, demonstrating various unique characteristics, including the production of high levels of IL-10 but little or no IL-12, defective TNF production, suppression of antigen presenting cells, and contribution to tumor angiogenesis.

[0167] Generally, TAMs are characterized by a M2 phenotype and suppress M1 macrophage-mediated inflammation through IL-10 and IL-1p production. Thus, TAMs promote tumor growth and metastasis through activation of wound-healing (i.e., anti-inflammatory) pathways that provide nutrients and growth signals for proliferation and invasion and promote the creation of new blood vessels (i.e., angiogenesis). In addition, TAMs contribute to the immune-suppressive tumor microenvironment by secreting anti-inflammatory signals that prevent other components of the immune system from recognizing and attacking the tumor. It has been reported that TAMs are key players in promoting cancer growth, proliferation, and metastasis in many types of cancers (e.g., breast cancer, astrocytoma, head and neck squamous cell cancer, papillary renal cell carcinoma Type II, lung cancer, pancreatic cancer, gall bladder cancer, rectal cancer, glioma, classical Hodgkin's lymphoma, ovarian cancer, and colorectal cancer). In general, a cancer characterized by a large population of TAMs is associated with poor disease prognosis.

[0168] The diversified functions and activation states can have dangerous consequences if not appropriately regulated. For example, classically activated macrophages can cause damage to host tissue, predispose surrounding tissue and influence glucose metabolism if over activated.

[0169] In many disease conditions, the balanced dynamics of macrophage activation states is interrupted and the imbalance causes diseases. For example, tumors are abundantly populated with macrophages. Macrophages can be found in 75 percent of cancers. The aggressive types of cancer are often associated with higher infiltration of macrophages and other immune cells. In most malignant tumors, TAM exert several tumor-promoting functions, including promotion of cancer cell survival, proliferation, invasion, extravasation and metastasis, stimulation of angiogenesis, remodeling of the extracellular matrix, and suppression of antitumor immunity (Qian and Pollard, 2010, Cell, 141(1): 39-51). They also could produce growth-promoting molecules such as ornithine, VEGF, EGF and TGF-β.

[0170] TAMs stimulate tumor growth and survival in response to CSF1 and IL4/IL13 encountered in the tumor microenvironment. TAMs also can remodel the tumor microenvironment through the expression of proteases, such as MMPs, cathepsins and uPA and matrix remodeling enzymes (e.g., lysyl oxidase and SPARC).

[0171] TAMs play an important role in tumor angiogenesis regulating the dramatic increase of blood vessel in tumor tissues which is required for the transition of the malignant state of tumor. These angiogenic TAMs express angiopoietin receptor, TIE2 and secrete many angiogenic molecules including VEGF family members, TNFα, IL1β, IL8, PDGF and FGF.

[0172] A diversity of subpopulations of macrophages perform these individual pro-tumoral functions. These TAMs are different in the extent of macrophage infiltrate as well as phenotype in different tumor types. For example, detailed profiling in human hepatocellular carcinoma shows various macrophage sub-types defined in terms of their anatomic location, and pro-tumoral and anti-tumoral properties. It has been shown that M2-like macrophages are a major resource of pro-tumoral functions of TAMs. M2-like TAMs have been shown to affect the efficacy of anti-cancer treatments, contribute to therapy resistance, and mediate tumor relapse following conventional cancer therapy.

### III. Targets and Biomarkers Useful for Modulating Monocyte and/or Macrophage Inflammatory Phenotype

[0173] The present invention encompasses biomarkers (e.g., targets listed in Table 1 and Table 2) useful for modulating the inflammatory phenotype of monocytes and/or macrophages, as well as corresponding immune responses (e.g., to increase anti-cancer macrophage immunotherapy).

[0174] Table 1 provides gene information for targets, wherein their downregulation, such as by agents that downregulate the targets like antibodies, siRNAs, and the like described herein, is associated with and results in an increased inflammatory phenotype (e.g., a Type 1 phenotype).

[0175] Table 2 provides gene information for targets, wherein their downregulation, such as by agents that downregulate the targets like antibodies, siRNAs, and the like described herein, is associated with and results in a decreased inflammatory phenotype (e.g., a Type 2 phenotype).

[0176] Nucleic acid and amino acid sequence information for the loci and biomarkers encompassed by the present invention (e.g., biomarkers listed in Tables 1 and 2) are well-known in the art and readily available on publicly available databases, such as the National Center for Biotechnology Information (NCBI). For example, exemplary nucleic acid and amino acid sequences derived from publicly available sequence databases are provided below.

[0177] As discussed further below, agents that modulate the expression, translation, degradation, amount, subcellular localization, and other activities of biomarkers encompassed by the present invention in monocytes and/or macrophages are useful in modulating the inflammatory phenotype of these cells, as well as modulating immune responses mediated by these cells.

[0178] Although numerous representative orthologs to human sequences are provided below, in some embodiments, human biomarkers (including modulation and modulatory agents thereof) are preferred. For some biomarkers, it is believed that immune responses mediated by such biomarkers in humans is particularly useful in view of differences between the human immune system and the immune system of other vertebrates.

[0179] The term “SIGLEC9” refers to Sialic Acid Binding Ig Like Lectin 9, a putative adhesion molecule that mediates sialic-acid dependent binding to cells. SIGLEC9 preferentially binds to alpha-2,3- or alpha-2,6-linked sialic acid. The sialic acid recognition site may be masked by cis interactions with sialic acids on the same cell surface. Among its related pathways are innate immune system and class I MHC mediated antigen processing and presentation. In some embodiments, the SIGLEC9 gene, located on chromosome 19q in humans, consists of 12 exons. Orthologs are known from chimpanzee, rhesus monkey, and mouse. A knockout mouse line, called Siglec^{tmc1Croc} was generated (McMillan et al. (2013) Blood 121(11):2084-2094). In some embodiments, human SIGLEC9 protein has 463 amino acids and/or has a molecular mass of 50082 Da. In some embodiments, the SIGLEC9 protein contains one copy of a cytoplasmic motif that is referred to as the immunoreceptor tyrosine-based inhibitor motif (ITIM). This motif is involved in modulation of cellular responses. The phosphorylated ITIM motif can bind the SH2 domain of several SH2-containing phosphatases.

[0180] The term “SIGLEC9” is intended to include fragments, variants (e.g., allelic variants), and derivatives thereof. Representative human SIGLEC9 cDNA and human SIGLEC9 protein sequences are well-known in the art and are publicly available from the National Center for Biotechnology Information (NCBI) (see, for example, ncbi.nlm.nih.gov/gene/27180). For example, at least two different human SIGLEC9 isoforms are known. Human SIGLEC9 isoform 1 (NP_001185487.1) is encodable by the transcript variant 1 (NM_001198558.1), which is the longer transcript. Human SIGLEC9 isoform 2 (NP_055256.1) is encodable by the transcript variant 2 (NM_014441.2), which differs in the 3 UTR and 3′ coding region compared to isoform 1. The encoded isoform 2 is shorter and has a distinct C-terminus compared to isoform 1. Nucleic acid and polypeptide sequences of SIGLEC9 orthologs in organisms other than humans are well-known and include, for example, chimpanzee SIGLEC9 (XM_024351618.1 and XP_024207386.1, and XM_003316566.5 and XP_003316614.2), rhesus monkey SIGLEC9 (XM_015124691.1 and XP_014980177.1, XM_001114560.3 and XP_001114560.2, XM_015124692.1 and XP_014980178.1), and mouse SIGLEC9 (NM_031181.2 and NP_112458.2). Representative sequences of SIGLEC9 orthologs are presented below in Table 1.

[0181] Anti-SIGLEC9 antibodies suitable for detecting SIGLEC9 protein are well-known in the art and include, for example, antibodies MAB1139 and AF1139 (R&D systems, Minneapolis, Minn.), antibodies MAB1139, NBP1-47969, AF1139, NBP2-27070 and NBP1-85755 (Novus Biologicals, Littleton, Colo.), antibodies ab89484, ab96545, and ab197981 (AbCam, Cambridge, Mass.), antibodies Cat #: CF500382 and TA500382 (Origene, Rockville, Md.), etc. Other anti-SIGLEC9 antibodies are also known and include, for example, those described in U.S. Pat. Pubs. US20170306014, US20190085077, US20190023786, and US20180244770. In addition, reagents are well-known for detecting SIGLEC9 expression. Multiple clinical tests of SIGLEC9 are available in NIH Genetic Testing Registry (GTR®) (e.g., GTR Test ID: GTR000547533.2, offered by Fulgent Clinical Diagnostics Lab (Temple City, Calif.)). Moreover, multiple siRNA, shRNA, CRISPR constructs for reducing SIGLEC9 expression can be found in the commercial product lists of the above-referenced companies, such as siRNA product #SR309022, shRNA products #TG309443, TL309443, and CRISPR products #KN206674 from Origene Technologies (Rockville, Md.), CRISPR gRNA products from Santa Cruz (sc-406675 and sc-406675-KO-2), and RNAi products from Santa Cruz (Cat #sc-106550 and sc-153462). It is to be noted that the term can further be used to refer to any combination of features described herein regarding SIGLEC9 molecules. For example, any combination of sequence composition, percentage identify, sequence length, domain structure, functional activity, etc. can be used to describe a SIGLEC9 molecule encompassed by the present invention.

[0182] The term “VSIG4” refers to V-Set And Immunoglobulin Domain Containing 4, a v-set and immunoglobulin-domain containing protein that is structurally related to the B7 family of immune regulatory proteins. The VSIG4 protein is a negative regulator of T-cell responses. It is also a receptor for the complement component 3 fragments C3b and iC3b. VSIG4 protein is a phagocytic receptor, and a strong negative regulator of T-cell proliferation and IL2 production. It is also a potent inhibitor of the alternative complement pathway convertases. Diseases associated with VSIG4 include T-Cell/Histiocyte Rich Large B Cell Lymphoma and Langerhans Cell Sarcoma. Among its related pathways are complement and coagulation cascades. In some embodiments, the VSIG4 gene, located on chromosome Xq in humans, consists of 8 exons. Orthologs are known from chimpanzee, rhesus monkey, dog, mouse, and rat. Knockout mouse lines, incluinng Vsig4^{tmlGne}, (Helmy et al. (2006) Cell 124:915-927) and Vsig4^{tmlb(EUCOM)Hmgu} (Skarnes et al. (2011) Nature 474:337-342), exist. In some embodiments, human VSIG4 protein has 399 amino acids and/or a molecular mass of 43987 Da.

[0183] The term “VSIG4” is intended to include fragments, variants (e.g., allelic variants), and derivatives thereof. Representative human VSIG4 cDNA and human VSIG4 protein sequences are well-known in the art and are publicly available from the National Center for Biotechnology Information (NCBI) (see, for example, ncbi.nlm.nih.gov/gene/11326). For example, at least five different human VSIG4 isoforms are known. Human VSIG4 isoform 1 (NP_009199.1) is encodable by the transcript variant 1 (NM_007268.2), which is the longest transcript. Human VSIG4 isoform 2 (NP_001093901.1) is encodable by the transcript variant 2 (NM_001100431.1), which lacks an alternate in-frame segment compared to variant 1. Human VSIG4 isoform 3 (NP_001171760.1) is encodable by the transcript variant 3 (NM_001184831.1), which has multiple differences, compared to variant 1. Human VSIG4 isoform 4 (NP_001171759.1) is encodable by the transcript variant 4 (NM_001184830.1), which differs in the 3′ UTR and 3′ coding region, compared to variant 1. Human VSIG4 isoform 5 (NP_001244332.1) is encodable by the transcript variant 5 (NM_001257403.1), which lacks two alternate in-frame exons in the 3′ coding region, compared to variant 1. Nucleic acid and polypeptide sequences of VSIG4 orthologs in organisms other than humans are well-known and include, for example, chimpanzee VSIG4 (NM_001279873.1 and NP_001266802.1), rhesus monkey VSIG4 (XM_015127596.1 and XP_014983082.1, XM_015127593.1 and XP_014983079.1, XM_015127595.1 and XP_014983081.1, XM_001099264.2 and XP_001099264.2, and XM_015127594.1 and XP_014983080.1), dog VSIG4 (XM_005641424.3 and XP_005641481.1; XM_005641423.3 and XP_005641480.1; XM_022416007.1 and XP_022271715.1; XM_005641421.3 and XP_005641478.1; and XM_005641422.3 and XP_005641479.1), mouse VSIG4 (NM_177789.4 and NP_808457.1), and rat VSIG4 (NM_001025004.1 and NP_001020175.1). Representative sequences of VSIG4 orthologs are presented below in Table 1.

[0184] Anti-VSIG4 antibodies suitable for detecting VSIG4 protein are well-known in the art and include, for example, antibodies AF4646 and AF4674 (R&D systems, Minneapolis, Minn.), antibodies NBP1-86843, AF4646, AF4674, and NBP1-69631 (Novus Biologicals, Littleton, Colo.), antibodies ab56037, ab197161, and ab138594 (AbCam, Cambridge, Mass.), antibodies Cat #: TA346124 (Origene, Rockville, Md.), antibodies 05 and 202 (Sino Biological, Beijing, China), etc. Other anti-VSIG4 antibodies are also known and include, for example, those described in U.S. Pat. Pubis. US20090162356A1 and US20180371095A1. In addition, reagents are well-known for detecting VSIG4 expression. Multiple clinical tests of VSIG4 are available in NIH Genetic Testing Registry (GTR®) (e.g., GTR Test ID: GTR000544515.2, offered by Fulgent Clinical Diagnostics Lab (Temple City, Calif.)). Moreover, multiple siRNA, shRNA, CRISPR constructs for reducing VSIG4 expression can be found in the commercial product lists of the above-referenced companies, such as siRNA product #SR323415, shRNA products #TG308440, TL308440, TF308440, and CRISPR products #KN203751 from Origene Technologies (Rockville, Md.), CRISPR gRNA products from Applied Biological Materials (K7367508) and from Santa Cruz (sc-404067), and RNAi products from Santa Cruz (Cat #sc-72190 and sc-72196). It is to be noted that the term can further be used to refer to any combination of features described herein regarding VSIG4 molecules. For example, any combination of sequence composition, percentage identify, sequence length, domain structure, functional activity, etc. can be used to describe a VSIG4 molecule encompassed by the present invention.

[0185] The term “CD74” refers to CD74. The protein encoded by this gene associates with class II major histocompatibility complex (MHC) and is an important chaperone that regulates antigen presentation for immune response. It also serves as cell surface receptor for the cytokine macrophage migration inhibitory factor (MIF) which, when bound to the encoded protein, initiates survival pathways and cell proliferation. CD74 protein also interacts with amyloid precursor protein (APP) and suppresses the production of amyloid beta (Abeta). In addition, CD74 protein plays a critical role in MHC class II antigen processing by stabilizing peptide-free class II alpha/beta heterodimers in a complex soon after their synthesis and directing transport of the complex from the endoplasmic reticulum to the endosomal/lysosomal system where the antigen processing and binding of antigenic peptides to MHC class II takes place. CD74 protein serves as cell surface receptor for the cytokine MIF. Diseases associated with CD74 include undifferentiated pleomorphic sarcoma and mantle cell lymphoma. Among its related pathways are response to elevated platelet cytosolic Ca²⁺ and innate immune system. In some embodiments, the CD74 gene, located on chromosome 5q in humans, consists of 9 exons. Orthologs are known from chimpanzee, rhesus monkey, dog, mouse, rat, chicken, and frog. Knockout mouse lines, including CD74^{tm1Doi} (Viville et al. (1993) Cell 72:635-648), CD74^{tm1Liz} (Bikoff et al. (1993) JExp Aed 177:1699-1712), CD74^{tm1Eae} (Elliott et al. (1994) J Exp Med 179:681-694), and CD74^{tm1Anjm}(Barlow et al. (2010) Nat Afed 16:59-66), and CD74^{tm2Liz} (Takaesu et al. (1995) Immunrity 3:385-396), exist. In some embodiments, human CD74 protein has 296 amino acids and/or a molecular mass of 33516 Da. In some embodiments, CD74 protein contains a MHC2-interacting domain, a class II MHC-associated invariant chain trimerisation domain, and thyroglobulin type I repeats.

[0186] The term “CD74” is intended to include fragments, variants (e.g., allelic variants), and derivatives thereof. Representative human CD74 cDNA and human CD74 protein sequences are well-known in the art and are publicly available from the National Center for Biotechnology Information (NCBI) (see, for example, ncbi.nlm.nih.gov/gene/972). For example, at least three different human CD74 isoforms are known. Human CD74 isoform A (NP_001020330.1) is encodable by the transcript variant 1 (NM_001025159.2), which is the longest transcript. Human CD74 isoform B (NP_004346.1) is encodable by the transcript variant 2 (NM_004355.3), which lacks lacks an in-frame exon in the 3′ coding region, compared to variant 1. Human CD74 isoform C (NP_001020329.1) is encodable by the transcript variant 3 (NM_001025158.2), which lacks three consecutive exons in the 3′ coding region, which results in a frame-shift, compared to variant 1. Nucleic acid and polypeptide sequences of CD74 orthologs in organisms other than humans are well-known and include, for example, chimpanzee CD74 (NM_001144836.1 and NP_001138308.1), rhesus monkey CD74 (XM_015141237.1 and XP_014996723.1, and XM_015141236.1 and XP_014996722.1), dog CD74 (XM_536468.7 and XP_536468.5; and XM_005619298.3 and XP_005619355.1), mouse CD74 (NM_001042605.1 and NP_001036070.1; and NM_010545.3 and NP_034675.1), rat CD74 (NM_013069.2 and NP_037201.1), chicken CD74 (XM_015293754.2 and XP_015149240.1), and frog CD74 (NM_001197110.1 and NP_001184039.1). Representative sequences of CD74 orthologs are presented below in Table 1.

[0187] Anti-CD74 antibodies suitable for detecting CD74 protein are well-known in the art and include, for example, antibodies AF3590 and MAB35901 (R&D systems, Minneapolis, Minn.), antibodies NBP2-29465, NBP2-66762, NBP1-33109, and NBP1-85225 (Novus Biologicals, Littleton, Colo.), antibodies ab9514, ab22603, and ab108393 (AbCam, Cambridge, Mass.), antibodies Cat #: CF507339 and TA507339 (Origene, Rockville, Md.), etc. Other anti-CD74 antibodies are also known and include, for example, those described in U.S. Pat. Pubis. US20140030273, US20170173151, U.S. Pat. No. 7,312,318, and US20170253656. In addition, reagents are well-known for detecting CD74 expression. Multiple clinical tests of CD74 are available in NIH Genetic Testing Registry (GTR®)(e.g., GTR Test ID: GTR000532717.2, offered by Fulgent Clinical Diagnostics Lab (Temple City, Calif.)). Moreover, multiple siRNA, shRNA, CRISPR constructs for reducing CD74 expression can be found in the commercial product lists of the above-referenced companies, such as siRNA product #SR300649, shRNA products #TR314068, TL314068, TG314068, and CRISPR products #KN205824 from Origene Technologies (Rockville, Md.), CRISPR gRNA products from Applied Biological Materials (K6656308) and from Santa Cruz (sc-400279), and RNAi products from Santa Cruz (Cat #sc-35023 and sc-42802). It is to be noted that the term can further be used to refer to any combination of features described herein regarding CD74 molecules. For example, any combination of sequence composition, percentage identify, sequence length, domain structure, functional activity, etc. can be used to describe a CD74 molecule encompassed by the present invention.

[0188] The term “CD207” refers to CD207. CD207 protein is expressed only in Langerhans cells which are immature dendritic cells of the epidermis and mucosa. It is localized in the Birbeck granules, organelles present in the cytoplasm of Langerhans cells and consisting of superimposed and zippered membranes. It is a C-type lectin with mannose binding specificity, and it has been proposed that mannose binding by CD207 protein leads to internalization of antigen into Birbeck granules and providing access to a nonclassical antigen-processing pathway. Mutations in CD207 result in Birbeck granules deficiency or loss of sugar binding activity. In addition, CD207 protein is a calcium-dependent lectin displaying mannose-binding specificity. CD207 protein induces the formation of Birbeck granules (BGs) and is a potent regulator of membrane superimposition and zippering. CD207 protein binds to sulfated as well as mannosylated glycans, keratan sulfate (KS) and beta-glucans, facilitates uptake of antigens, and is involved in the routing and/or processing of antigen for presentation to T cells. CD207 is a major receptor on primary Langerhans cells for Candida species, Saccharomyces species, and Malassezia furfur. CD207 protects against human immunodeficiency virus-1 (HIV-1) infection. It binds to high-mannose structures present on the envelope glycoprotein which is followed by subsequent targeting of the virus to the Birbeck granules leading to its rapid degradation. Diseases associated with CD207 include birbeck granule deficiency and langerhans cell histiocytosis. Among its related pathways are the innate immune system and class I MHC-mediated antigen processing and presentation. In some embodiments, the CD207 gene, located on chromosome 2p in humans, consists of 10 exons. Orthologs are known from chimpanzee, rhesus monkey, cow, mouse, rat, and frog. Knockout mouse lines, including CD207^{tm1Mal} (Kissenpfennig et al. (2005)Mol Cell boil 25:88-99) and CD207^{tm1.Cfg} (Orr et al. (2013) Glycobiology 23:363-380), exist. In some embodiments, human CD207 protein has 328 amino acids and/or a molecular mass of 36725 Da. In some embodiments, CD207 protein contains a Rad50 zinc hook motif and a C-type lectin-like domain. The C-type lectin domain mediates dual recognition of both sulfated and mannosylated glycans.

[0189] The term “CD207” is intended to include fragments, variants (e.g., allelic variants), and derivatives thereof. Representative human CD207 cDNA and human CD207 protein sequences are well-known in the art and are publicly available from the National Center for Biotechnology Information (NCBI) (see, for example, ncbi.nlm.nih.gov/gene/50489). For example, human CD207 (NP_056532.4) is encodable by the transcript (NM_015717.4). Nucleic acid and polypeptide sequences of CD207 orthologs in organisms other than humans are well-known and include, for example, chimpanzee CD207 (XM_016945490.2 and XP_016800979.1), rhesus monkey CD207 (XM_001100466.3 and XP_001100466.2), cattle CD207 (XM_015473414.2 and XP_015328900.2), and mouse CD207 (NM_144943.3 and NP_659192.2), rat CD207 (NM_013069.2 and NP_037201.1). Representative sequences of CD207 orthologs are presented below in Table 1.

[0190] Anti-CD207 antibodies suitable for detecting CD207 protein are well-known in the art and include, for example, antibodies AF2088, BAF2088, and MAB2088 (R&D systems, Minneapolis, Minn.), antibodies DDX0362P-100, DDX0363P-100, DDX0361P-100, and NB100-56733 (Novus Biologicals, Littleton, Colo.), antibodies ab192027 (AbCam, Cambridge, Mass.), antibodies Cat #: TA336470 and TA349377 (Origene, Rockville, Md.), etc. In addition, reagents are well-known for detecting CD207 expression. Multiple clinical tests of CD207 are available in NIH Genetic Testing Registry (GTR®) (e.g., GTR Test ID: GTR000516372.2, offered by Fulgent Clinical Diagnostics Lab (Temple City, Calif.)). Moreover, multiple siRNA, shRNA, CRISPR constructs for reducing CD207 expression can be found in the commercial product lists of the above-referenced companies, such as siRNA product #SR309386, shRNA products #TL305520V, TR305520, TG305520, TF305520, TL305520 and CRISPR products #KN204669 from Origene Technologies (Rockville, Md.), CRISPR gRNA products from Applied Biological Materials (K4909208) and from Santa Cruz (sc-401949), and RNAi products from Santa Cruz (Cat #sc-43888 and sc-43889). It is to be noted that the term can further be used to refer to any combination of features described herein regarding CD207 molecules. For example, any combination of sequence composition, percentage identify, sequence length, domain structure, functional activity, etc. can be used to describe a CD207 molecule encompassed by the present invention.

[0191] The term “LRRC25” refers to Leucine Rich Repeat Containing 25. LRRC25 gene has a broad expression in tissues including spleen and bone marrow. LRRC25 protein may be involved in the activation of cells of innate and acquired immunity. It is downregulated in CD40-activated monocyte-derived dendritic cells. Diseases associated with LRRC25 include transient global amnesia. In some embodiments, the LRRC25 gene, located on chromosome 19p in humans, consists of 3 exons. Orthologs are known from chimpanzee, rhesus monkey, dog, cow, mouse, and rat. In some embodiments, human LRRC25 protein has 305 amino acids and/or a molecular mass of 33179 Da. In some embodiments, LRRC25 protein contains two copies of leucine rich repeat, and a GRB2-binding adapter.

[0192] The term “LRRC25” is intended to include fragments, variants (e.g., allelic variants), and derivatives thereof. Representative human LRRC25 cDNA and human LRRC25 protein sequences are well-known in the art and are publicly available from the National Center for Biotechnology Information (NCBI) (see, for example, ncbi.nlm.nih.gov/gene/126364). For example, human LRRC25 (NP_660299.2) is encodable by the transcript (NM_145256.2). Nucleic acid and polypeptide sequences of LRRC25 orthologs in organisms other than humans are well-known and include, for example, chimpanzee LRRC25 (XM_009435028.3 and XP_009433303.1; and XM_001173930.6 and XP_001173930.1), rhesus monkey LRRC25 (XM_001114428.3 and XP_001114428.1), dog LRRC25 (XM_847238.5 and XP_852331.3; and XM_014122405.2 and XP_013977880.1), cattle LRRC25 (XM_005208421.4 and XP_005208478.1), mouse LRRC25 (NM_153074.3 and NP_694714.1), and rat LRRC25 (XM_573882.6 and XP_573882.1; XM_006252977.3 and XP_006253039.1; XM_008771187.2 and XP_008769409.1; XM_006252978.3 and XP_006253040.1; and XM_008771188.2 and XP_008769410.1). Representative sequences of LRRC25 orthologs are presented below in Table 1.

[0193] Anti-LRRC25 antibodies suitable for detecting LRRC25 protein are well-known in the art and include, for example, antibody GTX45692 (GeneTex, Irvine, Calif.), antibody sc-514216 (Santa Cruz Biotechnology), antibodies NBP2-03747, NBPI-83476, and NBP2-45673 (Novus Biologicals, Littleton, Colo.), antibody ab84954 (AbCam, Cambridge, Mass.), antibodies Cat #: TA504941 and CF504941 (Origene, Rockville, Md.), etc. In addition, reagents are well-known for detecting LRRC25 expression. Multiple clinical tests of LRRC25 are available in NIH Genetic Testing Registry (GTR®) (e.g., GTR Test ID: GTR000541158.2, offered by Fulgent Clinical Diagnostics Lab (Temple City, Calif.)). Moreover, multiple siRNA, shRNA, CRISPR constructs for reducing LRRC25 expression can be found in the commercial product lists of the above-referenced companies, such as siRNA product #SR325688, shRNA products #TL303467, TR303467, TG303467, TF303467, TL303467V and CRISPR products #KN209911 from Origene Technologies (Rockville, Md.), CRISPR gRNA products from Applied Biological Materials (K3598208) and from Santa Cruz (sc-414270), and RNAi products from Santa Cruz (Cat #sc-97675 and sc-149064). It is to be noted that the term can further be used to refer to any combination of features described herein regarding LRRC25 molecules. For example, any combination of sequence composition, percentage identify, sequence length, domain structure, functional activity, etc. can be used to describe a LRRC25 molecule encompassed by the present invention.

[0194] The term “SELPLG” or “PSGL 1” refers to Selectin P Ligand, a glycoprotein that functions as a high affinity counter-receptor for the cell adhesion molecules P-, E- and L-selectin expressed on myeloid cells and stimulated T lymphocytes. As such, SELPLG protein plays a critical role in leukocyte trafficking during inflammation by tethering of leukocytes to activated platelets or endothelia expressing selectins. SELPLG protein has two post-translational modifications, tyrosine sulfation and the addition of the sialyl Lewis x tetrasaccharide (sLex) to its O-linked glycans, for its high-affinity binding activity.

[0195] Aberrant expression of SELPLG and polymorphisms in SELPLG are associated with defects in the innate and adaptive immune response. SELPLG is a SLe(x)-type proteoglycan, which through high affinity, calcium-dependent interactions with E-, P- and L-selectins, mediates rapid rolling of leukocytes over vascular surfaces during the initial steps in inflammation. SELPLG is critical for initial leukocyte capture. In some embodiments, the SELPLG gene, located on chromosome 12q in humans, consists of 3 exons. Orthologs are known from chimpanzee, rhesus monkey, dog, cow, mouse, and rat. Knockout mouse lines, including Selpg^{tm2Rpmc} (Miner et al. (2008) Blood 112:2035-2045), Selpg^{tm1Fur} (Yang et al. (1999) Jap Med 190:1769-1782), and Selplg^{tm1Rpmc} (Xia et al. (2002) J Clin Invest 109:939-950), exist. In some embodiments, human SELPLG protein has 412 amino acids and/or a molecular mass of 43201 Da. In some embodiments, SELPLG protein contains a ribonuclease E/G family domain and/or can act as a receptor for enterovirus 71 during microbial infection. The known binding partners of SELPLG include, e.g., P-, E- and L-selectins, SNX20, MSN and SYK.

[0196] The term “SELPLG” is intended to include fragments, variants (e.g., allelic variants), and derivatives thereof. Representative human SELPLG cDNA and human SELPLG protein sequences are well-known in the art and are publicly available from the National Center for Biotechnology Information (NCBI) (see, for example, ncbi.nlm.nih.gov/gene/6404). For example, at least two different human SELPLG isoforms are known. Human SELPLG isoform 1 (NP_001193538.1) is encodable by the transcript variant 1 (NM_001206609.1), which is the longer transcript. Human SELPLG isoform 2 (NP_002997.2) is encodable by the transcript variant 2 (NM_003006.4), which differs in the 5′ UTR, lacks a portion of the 5′ coding region, and initiates translation at a downstream start codon compared to variant 1. The encoded isoform 2 has a shorter N-terminus, compared to isoform 1. Nucleic acid and polypeptide sequences of SELPLG orthologs in organisms other than humans are well-known and include, for example, chimpanzee SELPLG (XM_016924121.2 and XP_016779610.1), rhesus monkey SELPLG (XM_015152715.1 and XP_015008201.1; and XM_015152716.1 and XP_015008202.1), dog SELPLG (NM_001242719.1 and NP_001229648.1), cattle SELPLG (NM_001037628.2 and NP_001032717.2; and NM_001271160.1 and NP_001258089.1), mouse SELPLG (NM_009151.3 and NP_033177.3), and rat SELPLG (NM_001013230.1 and NP_001013248.1). Representative sequences of SELPLG orthologs are presented below in Table 1.

[0197] Anti-SELPLG antibodies suitable for detecting SELPLG protein are well-known in the art and include, for example, antibodies GTX19793, GTX54688, and GTX34468 (GeneTex, Irvine, Calif.), antibodies sc-365506, and sc-398402 (Santa Cruz Biotechnology), antibodies MAB9961, MAB996, NBP2-53344, and AF3345 (Novus Biologicals, Littleton, Colo.), antibodies ab68143, ab66882, and ab110096 (AbCam, Cambridge, Mass.), antibodies Cat #: TA349432 and TA338245 (Origene, Rockville, Md.), etc. Other anti-SELPLG antibodies are also known and include, for example, those described in U.S. Pat. Publs. US20130209449, US20170190782A1, and US20070160601A, and U.S. Pat. Nos. U.S. Pat. No. 7,833,530B2 and U.S. Pat. No. 9,487,585B2. In addition, reagents are well-known for detecting SELPLG expression. Multiple clinical tests of SELPLG are available in NIH Genetic Testing Registry (GTR®) (e.g., GTR Test ID: GTR000547735.2, offered by Fulgent Clinical Diagnostics Lab (Temple City, Calif.)). Moreover, multiple siRNA, shRNA, CRISPR constructs for reducing SELPLG expression can be found in the commercial product lists of the above-referenced companies, such as siRNA product #SR321732, shRNA products #TL309563, TR309563, TG309563, TF309563, TL309563V and CRISPR products #KN206507 from Origene Technologies (Rockville, Md.), CRISPR gRNA products from Applied Biological Materials (K6134408) and from Santa Cruz (sc-401534), and RNAi products from Santa Cruz (Cat #sc-36323 and sc-42833). It is to be noted that the term can further be used to refer to any combination of features described herein regarding SELPLG molecules. For example, any combination of sequence composition, percentage identify, sequence length, domain structure, functional activity, etc. can be used to describe a SELPLG molecule encompassed by the present invention.

[0198] The term “AIF1” refers to Allograft Inflammatory Factor 1, a protein that binds actin and calcium. AIF1 gene is induced by cytokines and interferon and may promote macrophage activation and growth of vascular smooth muscle cells and T-lymphocytes.

[0199] Polymorphisms in AIF1 may be associated with systemic sclerosis. AIF1 is an actin-binding protein that enhances membrane ruffling and RAC activation. It enhances the actin-bundling activity of LCP1, binds calcium, and plays a role in RAC signaling and in phagocytosis. AIF1 promotes the proliferation of vascular smooth muscle cells and of T-lymphocytes, enhances lymphocyte migration, and plays a role in vascular inflammation.

[0200] Diseases associated with AIF include chronic inflammatory demyelinating polyneuropathy and acute diarrhea. Among its related pathways are spinal cord injury. In some embodiments, the AIF1 gene, located on chromosome 6p in humans, consists of 6 exons. Knockout mouse lines, including Aif1^{tm1.1(KOMP)Wtsi} (Dickinson et al. (2016) Nature 537:208-514) and Aif1^{tm1Nsib} (Casimiro et al. (2013) Genesis 51:734-740), exist. In some embodiments, human AIF1 protein has 147 amino acids and/or a molecular mass of 16703 Da. In some embodiments, AIF1 protein contains a penta-EF hand (PEF) family domain.

[0201] The known binding partners of AIF1 include, e.g., LCP1.

[0202] The term “AIF1” is intended to include fragments, variants (e.g., allelic variants), and derivatives thereof. Representative human AIF1 cDNA and human AIF1 protein sequences are well-known in the art and are publicly available from the National Center for Biotechnology Information (NCBI) (see, for example, ncbi.nlm.nih.gov/gene/199). For example, at least two different human AIF1 isoforms are known. Human AIF1 isoform 1 (NP_001305899.1 and NP_116573.1) is encodable by the transcript variant 1 (NM_032955.2) and the transcript variant 4 (NM_001318970.1). Human AIF1 isoform 3 (NP_001614.3) is encodable by the transcript variant 3 (NM_001623.4), which encodes the longest isoform. The transcript variant 1 differs in the 5′ UTR, lacks a portion of the 5′ coding region, and initiates translation at a downstream start codon compared to variant 3. The transcript variant 4 uses an alternate splice site in the 5′ region and initiates translation at a downstream start codon compared to variant 3. Variants 1 and 4 encode the same isoform 1, which has a shorter N-terminus than isoform 3. Nucleic acid and polypeptide sequences of AIF1 orthologs in organisms other than humans are well-known and include, for example, chimpanzee AIF1 (XM_009450914.2 and XP_009449189.2; XM_009450910.2 and XP_009449185.2; XM_001154743.5 and XP_001154743.1; XM_009450908.3 and XP_009449183.1; and XM_024357095.1 and XP_024212863.1), rhesus monkey AIF1 (NM_001047118.1 and NP_001040583.1), dog AIF1 (XM_532072.6 and XP_532072.2), cattle AIF1 (NM_173985.2 and NP_776410.1), mouse AIF1 (NM_001361501.1 and NP_001348430.1; NM_001361502.1 and NP_001348431.1; NM_019467.3 and NP_062340.1), and rat AIF1 (NM_017196.3 and NP_058892.1). Representative sequences of AIF1 orthologs are presented below in Table 1.

[0203] Anti-AIF1 antibodies suitable for detecting AIF1 protein are well-known in the art and include, for example, antibodies GTX100042, GTX101495, and GTX632426 (GeneTex, Irvine, Calif.), antibodies sc-32725, and sc-398406 (Santa Cruz Biotechnology), antibodies NB100-1028, NBP2-19019, NBP2-16908, and NB100-2833 (Novus Biologicals, Littleton, Colo.), antibodies ab5076, ab178847, and ab48004 (AbCam, Cambridge, Mass.), antibodies Cat #: AP08793PU-N and AP08912PU-N(Origene, Rockville, Md.), etc. In addition, reagents are well-known for detecting AIF1 expression. Multiple clinical tests of AIF1 are available in NIH Genetic Testing Registry (GTR®) (e.g., GTR Test ID: GTR000542089.2, offered by Fulgent Clinical Diagnostics Lab (Temple City, Calif.)). Moreover, multiple siRNA, shRNA, CRISPR constructs for reducing AIF1 expression can be found in the commercial product lists of the above-referenced companies, such as siRNA product #SR300138, shRNA products #TL314878, TR314878, TG314878, TF314878, TL314878V and CRISPR products #KN203154 from Origene Technologies (Rockville, Md.), CRISPR gRNA products from Applied Biological Materials (K6902508) and from Santa Cruz (sc-400513), and RNAi products from Santa Cruz (Cat #sc-36323 and sc-42833). It is to be noted that the term can further be used to refer to any combination of features described herein regarding AIF1 molecules. For example, any combination of sequence composition, percentage identify, sequence length, domain structure, functional activity, etc. can be used to describe an AIF1 molecule encompassed by the present invention.

[0204] The term “CD84” refers to CD84 molecule, a membrane glycoprotein that is a member of the signaling lymphocyte activation molecule (SLAM) family. This family forms a subset of the larger CD2 cell-surface receptor Ig superfamily. The encoded protein is a homophilic adhesion molecule that is expressed in numerous immune cells types and is involved in regulating receptor-mediated signaling in those cells. Diseases associated with CD84 include leukemia, chronic lymphocytic. Among its related pathways are response to elevated platelet cytosolic ca2+ and cell surface interactions at the vascular wall. In some embodiments, the CD84 gene, located on chromosome 1q in humans, consists of 9 exons. Knockout mouse lines, including Cd84^{tm1Beni} (Hofmann et al. (2014) Plos One 9:e115306), Cd84 DlbOimP(Dickinson et al. (2016) Nature 537:508-514), and Cd84^{tm1Pls} (Cannnons et al. (2010) Immunity 32:253-265), exist. In some embodiments, human CD84 protein has 345 amino acids and/or a molecular mass of 38782 Da. In some embodiments, CD84 protein contains a N-terminal immunoglobulin (Ig)-like domain and an immunoglobulin domain. CD84 is a self-ligand receptor of the signaling lymphocytic activation molecule (SLAM) family. SLAM receptors triggered by homo- or heterotypic cell-cell interactions are modulating the activation and differentiation of a wide variety of immune cells and thus are involved in the regulation and interconnection of both innate and adaptive immune response. Activities are controlled by presence or absence of small cytoplasmic adapter proteins, SH2D1A/SAP and/or SH2D1B/EAT-2. CD84 can mediate natural killer (NK) cell cytotoxicity dependent on SH2D1A and SH2D1B. CD84 increases proliferative responses of activated T-cells and SH2D1A/SAP does not seem be required for this process. Homophilic interactions of CD84 enhance interferon gamma/IFNG secretion in lymphocytes and induce platelet stimulation via a SH2DA-dependent pathway. CD84 may serve as a marker for hematopoietic progenitor cells (Martin et al. (2001) J Immunol 167:3668-3676). CD84 is required for a prolonged T-cell:B-cell contact, optimal T follicular helper function, and germinal center formation. In germinal centers, CD84 is involved in maintaining B-cell tolerance and in preventing autoimmunity. In mast cells, CD84 negatively regulates high affinity immunoglobulin epsilon receptor signaling (Alvarez-Errico et al. (2011) J Immunol 187:5577-5586).

[0205] The term “CD84” is intended to include fragments, variants (e.g., allelic variants), and derivatives thereof. Representative human CD84 cDNA and human CD84 protein sequences are well-known in the art and are publicly available from the National Center for Biotechnology Information (NCBI) (see, for example, ncbi.nlm.nih.gov/gene/8832). For example, at least five different human CD84 isoforms are known. Human CD84 isoform 1 (NP_001171808.1) is encodable by the transcript variant 1 (NM_001184879.1), which is the longest transcript. Human CD84 isoform 2 (NP_003865.1) is encodable by the transcript variant 2 (NM_003874.3), which lacks an alternate, in-frame segment, compared to variant 1. Human CD84 isoform 3 (NP_001171810.1) is encodable by the transcript variant 3 (NM_001184881.1), which lacks two alternate segments, one of which shifts the reading frame, compared to variant 1. Human CD84 isoform 4 (NP_001171811.1) is encodable by the transcript variant 4 (NM_001184882.1), which lacks two alternate segments, compared to variant 1. Human CD84 isoform 5 (NP_001317671.1) is encodable by the transcript variant 5 (NM_001330742.1), which uses an alternate in-frame splice junction compared to variant 1. Nucleic acid and polypeptide sequences of CD84 orthologs in organisms other than humans are well-known and include, for example, chimpanzee CD84 (XM_016930506.2 and XP_016785995.1; and XM_001172059.4 and XP_001172059.1), rhesus monkey CD84 (XM_001117595.3 and XP_001117595.1, XM_015113569.1 and XP_014969055.1, and XM_015113561.1 and XP_014969047.1), dog CD84 (XM_022415343.1 and XP_022271051.1; and XM_005640884.3 and XP_005640941), cattle CD84 (XM_024989885.1 and XP_024845653.1; XM_024989884.1 and XP_024845652.1; XM_010802802.3 and XP_010801104.1; XM_010802805.3 and XP_010801107.1; XM_024989882.1 and XP_024845650.1, XM_024989883.1 and XP_024845651.1; and XM_024989886.1 and XP_024845654.1), mouse CD84 (NM_013489.3 and NP_038517.1; NM_001252472.1 and NP_001239401.1; and NM_001289470.1 and NP_001276399.1), and rat CD84 (NM_001192006.1 and NP_001178935.1). Representative sequences of CD84 orthologs are presented below in Table 1 and Table 2 because, as demonstrated herein, CD84 can differentially affect monocytes and/or macrophages to be more pro-inflammatory or more anti-inflammatory depending upon the context.

[0206] Anti-CD84 antibodies suitable for detecting CD84 protein are well-known in the art and include, for example, antibodies GTX32506, GTX75849, and GTX75851 (GeneTex, Irvine, Calif.), antibodies sc-39821, and sc-70810 (Santa Cruz Biotechnology), antibodies MAB1855, AF1855, NBP2-49635, and NB100-65929 (Novus Biologicals, Littleton, Colo.), antibodies ab131256, ab202841, and ab176513 (AbCam, Cambridge, Mass.), antibodies Cat #: SM1845R and SM1845PT (Origene, Rockville, Md.), etc. Other anti-CD84 antibodies are also known and include, for example, those described in U.S. Pat. Publs.

[0207] US20140147451A1, US20170260270A1, and US20180327493. In addition, reagents are well-known for detecting CD84 expression. Multiple clinical tests of CD84 are available in NIH Genetic Testing Registry (GTR®) (e.g, GTR Test ID: GTR000532250.2, offered by Fulgent Clinical Diagnostics Lab (Temple City, Calif.)). Moreover, multiple siRNA, shRNA, CRISPR constructs for reducing CD84 expression can be found in the commercial product lists of the above-referenced companies, such as siRNA product #SR322568, shRNA products #TL314062, TR314062, TG314062, TF314062, TL314062V and CRISPR products #KN204477 from Origene Technologies (Rockville, Md.), CRISPR gRNA products from Applied Biological Materials (K6196808) and from Santa Cruz (sc-416482), and RNAi products from Santa Cruz (Cat #sc-42810 and sc-42811). It is to be noted that the term can further be used to refer to any combination of features described herein regarding CD84 molecules. For example, any combination of sequence composition, percentage identify, sequence length, domain structure, functional activity, etc. can be used to describe a CD84 molecule encompassed by the present invention.

[0208] The term “IGSF6” refers to Immunoglobulin Superfamily Member 6. Diseases associated with IGSF6 include dysbaric osteonecrosis and inflammatory bowel disease. In some embodiments, the IGSF6 gene, located on chromosome 16p in humans, consists of 6 exons. IGSF6 is coded entirely within the intron of METTL9 which is transcribed in the opposite strand of the DNA. IGSF6 is localized to a locus associated with inflammatory bowel disease. In some embodiments, human IGSF6 protein has 241 amino acids and/or a molecular mass of 27013 Da. In some embodiments, IGSF6 contains an immunoglobulin domain.

[0209] The term “IGSF6” is intended to include fragments, variants (e.g., allelic variants), and derivatives thereof. Representative human IGSF6 cDNA and human IGSF6 protein sequences are well-known in the art and are publicly available from the National Center for Biotechnology Information (NCBI) (see, for example, ncbi.nlm.nih.gov/gene/10261). For example, human IGSF6 (NP_005840.2) is encodable by the transcript variant 1 (NM_005849.3). Nucleic acid and polypeptide sequences of IGSF6 orthologs in organisms other than humans are well-known and include, for example, chimpanzee IGSF6 (XM_001160217.6 and XP_001160217.1; and XM_016928690.2 and XP_016784179.1), rhesus monkey IGSF6 (XM_001093144.3 and XP_001093144.1), dog IGSF6 (XM_005621426.3 and XP_005621483.1; XM_005621428.3 and XP_005621485.1; and XM_022419960.1 and XP_022275668.1), cattle IGSF6 (XM_002697991.6 and XP_002698037.1), mouse IGSF6 (NM_030691.1 and NP_109616.1), rat IGSF6 (NM_133542.2 and NP_598226.1); and chicken IGSF6 (NM_001277599.1 and NP_001264528.1). Representative sequences of IGSF6 orthologs are presented below in Table 1.

[0210] Anti-IGSF6 antibodies suitable for detecting IGSF6 protein are well-known in the art and include, for example, antibody sc-377053 (Santa Cruz Biotechnology), antibodies DDX0220P-100, NBP1-84061, H00010261-M02, and H00010261-M01 (Novus Biologicals, Littleton, Colo.), antibody ab197659 (AbCam, Cambridge, Mass.), antibody Cat #: TA322553 (Origene, Rockville, Md.), etc. In addition, reagents are well-known for detecting IGSF6 expression. Multiple clinical tests of IGSF6 are available in NIH Genetic Testing Registry (GTR®) (e.g., GTR Test ID: GTR000542139.2, offered by Fulgent Clinical Diagnostics Lab (Temple City, Calif.)). Moreover, multiple siRNA, shRNA, CRISPR constructs for reducing IGSF6 expression can be found in the commercial product lists of the above-referenced companies, such as siRNA product #SR323049, shRNA products #TL312209, TR312209, TG312209, TF312209, TL312209V and CRISPR products #KN204717 from Origene Technologies (Rockville, Md.), CRISPR gRNA products from Applied Biological Materials (K7017208) and from Santa Cruz (sc-411445), and RNAi products from Santa Cruz (Cat #sc-93333 and sc-146192). It is to be noted that the term can further be used to refer to any combination of features described herein regarding IGSF6 molecules. For example, any combination of sequence composition, percentage identify, sequence length, domain structure, functional activity, etc. can be used to describe an IGSF6 molecule encompassed by the present invention.

[0211] The term “CD48” refers to CD48 molecule, a member of the CD2 subfamily of immunoglobulin-like receptors which includes SLAM (signaling lymphocyte activation molecules) proteins. CD48 protein is found on the surface of lymphocytes and other immune cells, dendritic cells and endothelial cells, and participates in activation and differentiation pathways in these cells. CD48 protein does not have a transmembrane domain, however, but is held at the cell surface by a GPI anchor via a C-terminal domain which maybe cleaved to yield a soluble form of the receptor. Among its related pathways are response to elevated platelet cytosolic Ca2+ and hematopoietic stem cell differentiation pathways and lineage-specific markers. In some embodiments, the CD48 gene, located on chromosome 1q in humans, consists of 5 exons. In some embodiments, human CD48 protein has 243 amino acids and/or a molecular mass of 27683 Da. A knockout mouse line, called CD48^{tm1Rsr} (Gonazalez-Cabrero et al. (1999) Proc Natl Acad Sci 96:1019-1023), exists. CD48 interacts with CD244 in a heterophilic manner. In some embodiments, CD48 protein contains one or more immunoglobulin-like domains.

[0212] The term “CD48” is intended to include fragments, variants (e.g., allelic variants), and derivatives thereof. Representative human CD48 cDNA and human CD48 protein sequences are well-known in the art and are publicly available from the National Center for Biotechnology Information (NCBI) (see, for example, ncbi.nlm.nih.gov/gene/962). For example, at least two different human CD48 isoforms are known. Human CD48 isoform 1 (NP_001769.2) is encodable by the transcript variant 1 (NM_001778.3), which is the shorter transcript. Human CD48 isoform 2 (NP_001242959.1) is encodable by the transcript variant 2 (NM_001256030.1), which differs in the 3′ UTR and coding region compared to variant 1. The encoded isoform 2 is longer and has a distinct C-terminus compared to isoform 1. Nucleic acid and polypeptide sequences of CD48 orthologs in organisms other than humans are well-known and include, for example, chimpanzee CD48 (XM_009435717.1 and XP_009433992.1; and XM_001172145.3 and XP_001172145.2), rhesus monkey CD48 (XM_015113628.1 and XP_014969114.1; XM_015113634.1 and XP_014969120.1; and XM_015113619.1 and XP_014969105.1), dog CD48 (XM_545759.6 and XP_545759.2; and XM_022415374.1 and XP_022271082.1), cattle CD48 (NM_001046002.1 and NP_001039467.1), mouse CD48 (NM_007649.5 and NP_031675.1: and NM_001360767.1 and NP_001347696.1), rat CD48 (NM_139103.1 and NP_620803.1); and chicken CD48 (NM_001277599.1 and NP_001264528.1). Representative sequences of CD48 orthologs are presented below in Table 1 and Table 2 because, as demonstrated herein, CD48 can differentially affect monocytes and/or macrophages to be more pro-inflammatory or more anti-inflammatory depending upon the context Anti-CD48 antibodies suitable for detecting CD48 protein are well-known in the art and include, for example, antibodies sc-70719, sc-70718 (Santa Cruz Biotechnology), antibodies AF3327, AF3644, MAB36441, and MAB-3644 (Novus Biologicals, Littleton, Colo.), antibodies ab9185, ab134049, ab119873, and ab76904 (AbCam, Cambridge, Mass.), antibodies Cat #: TA351055, TA320283 (Origene, Rockville, Md.), etc. Other anti-CD48 antibodies are also known and include, for example, those described in U.S. Pat. No.

[0213] U.S. Pat. No. 9,097,717B2 and U.S. Pat. Pubis. US20120076790, US20130230533, and US20180092984. In addition, reagents are well-known for detecting CD48 expression. Multiple clinical tests of CD48 are available in NIH Genetic Testing Registry (GTR®) (e.g., GTR Test ID: GTR000532164.2, offered by Fulgent Clinical Diagnostics Lab (Temple City, Calif.)). Moreover, multiple siRNA, shRNA, CRISPR constructs for reducing CD48 expression can be found in the commercial product lists of the above-referenced companies, such as siRNA product #SR300685, shRNA products #TL314079, TR314079, TG314079, TF314079, TL314079V and CRISPR products #KN204849 from Origene Technologies (Rockville, Md.), CRISPR gRNA products from Applied Biological Materials (K7408008) and from Santa Cruz (sc-416692), and RNAi products from Santa Cruz (Cat #sc-35008 and sc-35009). It is to be noted that the term can further be used to refer to any combination of features described herein regarding CD48 molecules. For example, any combination of sequence composition, percentage identify, sequence length, domain structure, functional activity, etc. can be used to describe a CD48 molecule encompassed by the present invention.

[0214] The term “CD33” refers to CD33 molecule, a putative adhesion molecule of myelomonocytic-derived cells that mediates sialic-acid dependent binding to cells. CD33 preferentially binds to alpha-2,6-linked sialic acid. The sialic acid recognition site may be masked by cis interactions with sialic acids on the same cell surface. In the immune response, CD33 may act as an inhibitory receptor upon ligand induced tyrosine phosphorylation by recruiting cytoplasmic phosphatase(s) via their SH2 domain(s) that block signal transduction through dephosphorylation of signaling molecules. CD33 induces apoptosis in acute myeloid leukemia in vitro. Diseases associated with CD33 include gallbladder lymphoma and extracutaneous mastocytoma. Among its related pathways are hematopoietic stem cell differentiation pathways and lineage-specific markers and innate immune system. In some embodiments, the CD33 gene, located on chromosome 19q in humans, consists of 14 exons. In some embodiments, human CD33 protein has 364 amino acids and/or a molecular mass of 39825 Da. CD33 interacts with PTPN6/SHP-1 and PTPN11/SHP-2 upon phosphorylation. In some embodiments, human CD33 protein contains two copies of a cytoplasmic motif that is referred to as the immunoreceptor tyrosine-based inhibitor motif (ITIM). This motif is involved in modulation of cellular responses. The phosphorylated ITIM motif can bind the SH2 domain of several SH2-containing phosphatases.

[0215] The term “CD33” is intended to include fragments, variants (e.g., allelic variants), and derivatives thereof. Representative human CD33 cDNA and human CD33 protein sequences are well-known in the art and are publicly available from the National Center for Biotechnology Information (NCBI) (see, for example, ncbi.nlm.nih.gov/gene/945). For example, at least three different human CD33 isoforms are known. Human CD33 isoform 1 (NP_001763.3) is encodable by the transcript variant 1 (NM_001772.3), which is the longest transcript. Human CD33 isoform 2 (NP_001076087.1) is encodable by the transcript variant 2 (NM_001082618.1), which lacks an alternate in-frame exon in the 5′ coding region, compared to variant 1, resulting in a shorter protein (isoform 2, also known as CD33m), compared to isoform 1. Human CD33 isoform 3 (NP_001171079.1) is encodable by the transcript variant 3 (NM_001177608.1), which differs in the 3′ UTR and coding sequence compared to variant 1. The encoded isoform 3 has a shorter and distinct C-terminus compared to isoform 1. Nucleic acid and polypeptide sequences of CD33 orthologs in organisms other than humans are well-known and include, for example, chimpanzee CD33 (XM_512850.7 and XP_512850.3; XM_009436143.3 and XP_009434418.1; and XM_016936702.2 and XP_016792191.1), rhesus monkey CD33 (XM_015124693.1 and XP_014980179.1; and XM_001114616.3 and XP_001114616.2), and dog CD33 (XM_005616249.2 and XP_005616306.1). Representative sequences of CD33 orthologs are presented below in Table 1.

[0216] Anti-CD33 antibodies suitable for detecting CD33 protein are well-known in the art and include, for example, antibodies sc-514119, sc-376184 (Santa Cruz Biotechnology), antibodies NBP2-22377, NBP2-29619, NBP2-37388, and MAB1137 (Novus Biologicals, Littleton, Colo.), antibodies ab199432, ab134115, ab30371, and ab11032 (AbCam, Cambridge, Mass.), antibodies Cat #: CF806758, TA806758 (Origene, Rockville, Md.), etc. Other anti-CD33 antibodies are also known and include, for example, those described in U.S. Pat. Publs. US20150125447A1, US20160362490A1, US20170002074A1, and US20190002560A1 and U.S. Pat. Nos. 7,022,500B1, and 9,587,019B2. In addition, reagents are well-known for detecting CD33 expression. Multiple clinical tests of CD33 are available in NIH Genetic Testing Registry (GTR®) (e.g., GTR Test ID: GTR000532386.2, offered by Fulgent Clinical Diagnostics Lab (Temple City, Calif.)). Moreover, multiple siRNA, shRNA, CRISPR constructs for reducing CD33 expression can be found in the commercial product lists of the above-referenced companies, such as siRNA product #SR319607, shRNA products #TL314092, TR314092, TG314092, TF314092, TL314092V and CRISPR products #KN207023 from Origene Technologies (Rockville, Md.), CRISPR gRNA products from Applied Biological Materials (K3368408) and from Santa Cruz (sc-401011), and RNAi products from Santa Cruz (Cat #sc-42782 and sc-42783). It is to be noted that the term can further be used to refer to any combination of features described herein regarding CD33 molecules. For example, any combination of sequence composition, percentage identify, sequence length, domain structure, functional activity, etc. can be used to describe a CD33 molecule encompassed by the present invention.

[0217] The term “LST1” refers to Leukocyte Specific Transcript 1, a membrane protein that can inhibit the proliferation of lymphocytes. Expression of LST1 is enhanced by lipopolysaccharide, interferon-gamma, and bacteria. LST1 induces morphological changes including production of filopodia and microspikes when overexpressed in a variety of cell types and may be involved in dendritic cell maturation. Isoform 1 and isoform 2 of LST1 have an inhibitory effect on lymphocyte proliferation. In some embodiments, the LST1 gene, located on chromosome 6p in humans, consists of 6 exons. In some embodiments, human LST1 protein has 97 amino acids and/or a molecular mass of 10792 Da.

[0218] The term “LST1” is intended to include fragments, variants (e.g., allelic variants), and derivatives thereof. Representative human LST1 cDNA and human LST1 protein sequences are well-known in the art and are publicly available from the National Center for Biotechnology Information (NCBI) (see, for example, ncbi.nlm.nih.gov/gene/7940). For example, at least six different human LST1 isoforms are known. Human LST1 isoform 1 (NP_009092.3) is encodable by the transcript variant 1 (NM_007161.3), which is the longest transcript. Human LST1 isoform 2 (NP_995309.2) is encodable by the transcript variant 2 (NM_205837.2), which includes an additional exon in the 5′ UTR and lacks an internal exon that causes a frameshift in the 3′ coding region, compared to variant 1. Human LST1 isoform 3 (NP_995310.2) is encodable by the transcript variant 3 (NM_205838.2), which includes an additional exon in the 5′ UTR, lacks an alternate in-frame exon in the 5′ coding region, and uses an alternate in-frame splice site in the 3′ coding region, compared to variant 1. Human LST1 isoform 4 (NP_995311.2) is encodable by the transcript variant 4 (NM_205839.2), includes an additional exon in the 5′ UTR and uses an alternate in-frame splice site in the 3′ coding region, compared to variant 1. Human LST1 isoform 5 (NP_995312.2) is encodable by the transcript variant 5 (NM_205840.2), which lacks an alternate exon in the central coding region and uses an alternate splice site that causes a frameshift in the 3′ coding region compared to variant 1. Human LST1 isoform 6 (NP_001160010.1) is encodable by the transcript variant 6 (NM_001166538.1), which lacks an alternate in-frame exon in the 5′ coding region, compared to variant 1, resulting in an isoform 6 that is shorter than isoform 1. Nucleic acid and polypeptide sequences of LST1 orthologs in organisms other than humans are well-known and include, for example, chimpanzee LST1 (XM_009450906.3 and XP_009449181.1; XM_009450900.3 and XP_009449175.1; XM_009450905.3 and XP_009449180.1; XM_003950777.4 and XP_003950826.1; XM_016955125.2 and XP_016810614.1; XM_016955127.2 and XP_016810616.1; XM_016955126.2 and XP_016810615.1; XM_016955129.2 and XP_016810618.1; XM_009450901.3 and XP_009449176.1; and XM_009450902.3 and XP_009449177.1). Representative sequences of LST1 orthologs are presented below in Table 1.

[0219] Anti-LST1 antibodies suitable for detecting LST1 protein are well-known in the art and include, for example, antibody GTX16300 (GeneTex), antibodies NBP1-45072, NBP1-98482 and H00007940-BOIP (Novus Biologicals, Littleton, Colo.), antibodies ab14557 and ab172244 (AbCam, Cambridge, Mass.), antibody Cat #: AM20987PU-N(Origene, Rockville, Md.), etc. In addition, reagents are well-known for detecting LST expression. Multiple clinical tests of LST1 are available in NIH Genetic Testing Registry (GTR®) (e.g., GTR Test ID: GTR000541902.2, offered by Fulgent Clinical Diagnostics Lab (Temple City, Calif.)). Moreover, multiple siRNA, shRNA, CRISPR constructs for reducing LST1 expression can be found in the commercial product lists of the above-referenced companies, such as siRNA product #SR305318, shRNA products #TL311652, TR311652, TG311652, TF311652, TL311652V and CRISPR products #KN213273 from Origene Technologies (Rockville, Md.), CRISPR gRNA products from Applied Biological Materials (K7098808) and from Santa Cruz (sc-407477), and RNAi products from Santa Cruz (Cat #sc-95628 and sc-149136). It is to be noted that the term can further be used to refer to any combination of features described herein regarding LST1 molecules. For example, any combination of sequence composition, percentage identify, sequence length, domain structure, functional activity, etc. can be used to describe a LST molecule encompassed by the present invention.

[0220] The term “TNFAIP8L2” or “TIPE2” refers to TNF Alpha Induced Protein 8 Like 2. Diseases associated with TNFAIP8L2 include skin squamous cell carcinoma. Among its related pathways are metabolism and glycerophospholipid biosynthesis. TNFAIP8L2 acts as a negative regulator of innate and adaptive immunity by maintaining immune homeostasis. TNFAIP8L2 acts as a negative regulator of Toll-like receptor and T-cell receptor function. It also prevents hyperresponsiveness of the immune system and maintains immune homeostasis. TNFAIP8L2 inhibits JUN/API and NF-kappa-B activation and promotes Fas-induced apoptosis. In some embodiments, the TNFAIP8L2 gene, located on chromosome 1q in humans, consists of 14 exons. A knockout mouse line, called Tnfaip812^{tm1Yhen}, exists (Sun et al. (2008) Cell 132:415-426). In some embodiments, human TNFAIP8L2 protein has 184 amino acids and/or a molecular mass of 20556 Da. The central region of TNFAIP8L2 protein was initially thought to constitute a DED (death effector) domain. However, 3D-structure data reveal a previously uncharacterized fold that is different from the predicted fold of a DED (death effector) domain. TNFAIP8L2 consists of a large, hydrophobic central cavity that is poised for cofactor binding.

[0221] The term “TNFAIP8L2” or “TIPE2” is intended to include fragments, variants (e.g., allelic variants), and derivatives thereof. Representative human TNFAIP8L2 cDNA and human TNFAIP8L2 protein sequences are well-known in the art and are publicly available from the National Center for Biotechnology Information (NCBI) (see, for example, ncbi.nlm.nih.gov/gene/79626). For example, human TNFAIP8L2 (NP_078851.2) is encoded by the transcript (NM_024575.4). Nucleic acid and polypeptide sequences of TNFAIP8L2 orthologs in organisms other than humans are well-known and include, for example, chimpanzee TNFAIP8L2 (XM_009431068.3 and XP_009429343.1; and XM_003308373.4 and XP_003308421.1), rhesus monkey TNFAIP8L2 (NM_001257419.1 and NP_001244348.1), dog TNFAIP8L2 (XM_005630793.3 and XP_005630850.1; and XM_540310.6 and XP_540310.2), cattle TNFAIP8L2 (NM_001034389.1 and NP_001029561.1), mouse TNFAIP8L2 (NM_027206.2 and NP_081482.1), rat TNFAIP8L2 (NM_001014039.1 and NP_001014061.1); tropical clawed frog TNFAIP8L2 (XM_012969840.1 and XP_012825294.1; XM_012969842.1 and XP_012825296.1; XM_012969839.1 and XP_012825293.1; and XM_012969841.1 and XP_012825295.1); and zebrafish TNFAIP8L2 (NM_200374.1 and NP_956668.1). Representative sequences of TNFAIP8L2 orthologs are presented below in Table 1.

[0222] Anti-TNFAIP8L2 antibodies suitable for detecting TNFAIP8L2 protein are well-known in the art and include, for example, antibodies H00079626-B01P and H00079626-D01P (Novus Biologicals, Littleton, Colo.), antibodies Cat #: TA315795, AP54305PU-N (Origene, Rockville, Md.), etc. In addition, reagents are well-known for detecting TNFAIP8L2 expression. Multiple clinical tests of TNFAIP8L2 are available in NIH Genetic Testing Registry (GTR®) (e.g., GTR Test ID: GTR000544194.2, offered by Fulgent Clinical Diagnostics Lab (Temple City, Calif.)). Moreover, multiple siRNA, shRNA, CRISPR constructs for reducing TNFAIP8L2 expression can be found in the commercial product lists of the above-referenced companies, such as siRNA product #SR312471, shRNA products #TL300917, TR300917, TG300917, TF300917, TL300917V and CRISPR products #KN209504 from Origene Technologies (Rockville, Md.), CRISPR gRNA products from Applied Biological Materials (K6597108), and RNAi products from Santa Cruz (Cat #sc-76702 and sc-76702-PR). It is to be noted that the term can further be used to refer to any combination of features described herein regarding TNFAIP8L2 molecules. For example, any combination of sequence composition, percentage identify, sequence length, domain structure, functional activity, etc. can be used to describe a TNFAIP8L2 molecule encompassed by the present invention.

[0223] The term “SPI1” or “PU.1” refers to Spi-1 Proto-Oncogene, an ETS-domain transcription factor that activates gene expression during myeloid and B-lymphoid cell development. The nuclear protein SPI1 binds to a purine-rich sequence known as the PU-box found near the promoters of target genes, and regulates their expression in coordination with other transcription factors and cofactors. The SPI1 protein can also regulate alternative splicing of target genes. SPI1 binds to the PU-box, a purine-rich DNA sequence (5-GAGGAA-3) that can act as a lymphoid-specific enhancer. SPI1 protein is a transcriptional activator that may be specifically involved in the differentiation or activation of macrophages or B-cells. SPI1 also binds RNA and may modulate pre-mRNA splicing. Diseases associated with SPI1 include inflammatory diarrhea and neutrophil-specific granule deficiency. Among its related pathways are RANK signaling in osteoclasts and osteoclast differentiation. In some embodiments, the SPI1 gene, located on chromosome 11p in humans, consists of 8 exons. Knockout mouse lines, including Spil^{tm1Ram} (McKercher et al. (1996) EMBO J. 15:5647-5658), Spi1^{tm2b(EUCOMM)Wtsi} (International Knockout Mouse Consortium), and Spi1^{tm2.1DgtHuman SPI1} (Iwasaki et al. (2005) Blood 106:1590-1600), exist. In some embodiments, SPI1 protein has 270 amino acids and/or a molecular mass of 31083 Da. SPI1 belongs to ETS family. The known binding partners of SPI1 include, e.g., CEBPD, NONO, RUNX1, SPIB, GFI1, and CEBPE.

[0224] The term “SPI1” or “PU.1” is intended to include fragments, variants (e.g., allelic variants), and derivatives thereof. Representative human SPI1 cDNA and human SPI1 protein sequences are well-known in the art and are publicly available from the National Center for Biotechnology Information (NCBI) (see, for example, ncbi.nlm.nih.gov/gene/6688). For example, at least two different human SPI1 isoforms are known. Human SPI1 isoform 1 (NP_001074016.1) is encodable by the transcript variant 1 (NM_001080547.1), which is the longer transcript. Human SPI1 isoform 2 (NP_003111.2) is encodable by the transcript variant 2 (NM_003120.2), which uses an alternate in-frame splice site in the 5′ coding region, compared to variant 1, resulting in a shorter protein (isoform 2). Nucleic acid and polypeptide sequences of SPI1 orthologs in organisms other than humans are well-known and include, for example, dog SPI1 (XM_005631240.3 and XP_005631297.1; and XM_848897.5 and XP_853990.1), cattle SPI1 (NM_001192133.2 and NP_001179062.1), mouse SPI1 (NM_011355.2 and NP_035485.1), rat SPI1 (NM_001005892.2 and NP_001005892.1), chicken SPI1 (NM_205023.1 and NP_990354.1), tropical clawed frog SPI (NM_001145983.1 and NP_001139455.1), and zebrafsh SPI1 (NM_001328368.1 and NP_001315297.1; NM_001328369.1 and NP_001315298.1.; and NM_198062.2 and NP_932328.2). Representative sequences of SPI1 orthologs are presented below in Table 1.

[0225] Anti-SPI1 antibodies suitable for detecting SPI1 protein are well-known in the art and include, for example, antibodies GTX128266, GTX101581, and GTX60620 (GeneTex, Irvine, Calif.), antibody sc-390659 (Santa Cruz Biotechnology), antibodies NBP2-27163, NBP1-00135, MAB7124, and MAB5870 (Novus Biologicals, Littleton, Colo.), antibodies ab76543, ab88082, and ab76542 (AbCam, Cambridge, Mass.), antibodies Cat #: CF808850 and TA808850 (Origene, Rockville, Md.), etc. In addition, reagents are well-known for detecting SPI1 expression. Multiple clinical tests of SPI1 are available in NIH Genetic Testing Registry (GTR®) (e.g., GTR Test ID: GTR000546129.2, offered by Fulgent Clinical Diagnostics Lab (Temple City, Calif.)). Moreover, multiple siRNA, shRNA, CRISPR constructs for reducing SPI1 expression can be found in the commercial product lists of the above-referenced companies, such as siRNA product #SR304549, shRNA products #TL316738, TR 316738, TG 316738, TF 316738, TL316738V and CRISPR products #KN212818 from Origene Technologies (Rockville, Md.), CRISPR gRNA products from Applied Biological Materials (K6488408) and from Santa Cruz (sc-400547-KO-2), and RNAi products from Santa Cruz (Cat #sc-36330 and sc36331). It is to be noted that the term can further be used to refer to any combination of features described herein regarding SPI1 molecules. For example, any combination of sequence composition, percentage identify, sequence length, domain structure, functional activity, etc. can be used to describe a SPI molecule encompassed by the present invention.

[0226] The term “LILRB2” refers to Leukocyte Immunoglobulin Like Receptor B2, a member of the leukocyte immunoglobulin-like receptor (LIR) family, which is found in humans in a gene cluster at chromosomal region 19q13.4. The encoded protein belongs to the subfamily B class of LIR receptors, generally which contain two or four extracellular immunoglobulin domains, a transmembrane domain, and two to four cytoplasmic immunoreceptor tyrosine-based inhibitory motifs (ITIMs). The receptor is expressed on immune cells where it binds to MHC class I molecules on antigen-presenting cells and transduces a negative signal that inhibits stimulation of an immune response. It is thought to control inflammatory responses and cytotoxicity to help focus the immune response and limit autoreactivity. Among its related pathways are innate immune system and osteoclast differentiation. LILRB2 is a receptor for class I MHC antigens. It recognizes a broad spectrum of HLA-A, HLA-B, HLA-C and HLA-G alleles. LILRB2 is involved in the down-regulation of the immune response and the development of tolerance. LILRB2 competes with CD8A for binding to class I MHC antigens. LILRB2 inhibits FCGRIA-mediated phosphorylation of cellular proteins and mobilization of intracellular calcium ions. In some embodiments, the LILRB2 gene, located on chromosome 19q in humans, consists of 15 exons. In some embodiments, human LILRB2 protein has 598 amino acids and/or a molecular mass of 65039 Da. In some embodiments, LILRB2 contains 3 copies of a cytoplasmic motif that is referred to as the immunoreceptor tyrosine-based inhibitor motif (ITIM). This motif is involved in modulation of cellular responses. The phosphorylated ITIM motif can bind the SH2 domain of several SH2-containing phosphatases. The known binding partners of LILRB2 include, e.g., PTPN6 and FCGRIA.

[0227] The term “LILRB2” is intended to include fragments, variants (e.g., allelic variants), and derivatives thereof. Representative human LILRB2 cDNA and human LILRB2 protein sequences are well-known in the art and are publicly available from the National Center for Biotechnology Information (NCBI) (see, for example, ncbi.nlm.nih.gov/gene/10288). For example, at least five different human LILRB2 isoforms are known. Human LILRB2 isoform 1 (NP_005865.3) is encodable by the transcript variant 1 (NM_005874.4), which is the longest transcript. Human LILRB2 isoform 2 (NP_001074447.2 and NP_001265332.2) is encodable by the transcript variant 2 (NM_001080978.3), which uses an alternate in-frame splice site in the central coding region, compared to variant 1, and by the transcript variant 3 (NM_001278403.2), which differs in the 5′ UTR and uses an alternate in-frame splice site in the central coding region, compared to variant 1. The encoded isoform 2 is shorter, compared to isoform 1. Both variants 2 and 3 encode the same isoform. Human LILRB2 isoform 3 (NP_001265333.2) is encodable by the transcript variant 4 (NM_001278404.2), which lacks a portion of the 5′ coding region, and uses a downstream in-frame start codon, compared to variant 1. The encoded isoform (3) has a shorter N-terminus, compared to isoform 1. Human LILRB2 isoform 4 (NP_001265334.2) is encodable by the transcript variant 5 (NM_001278405.2), which has a shorter 5′ UTR, and lacks an internal exon which results in a frameshift and an early stop codon, compared to variant 1. The encoded isoform (4) has a shorter and distinct C-terminus, compared to isoform 1. Human LILRB2 isoform 5 (NP_001265335.2) is encodable by the transcript variant 6 (NM_001278406.2), which has a shorter 5′ UTR, lacks several exons, and its 3′-terminal exon extends past a splice site that is used in variant 1. The resulting protein (isoform 5) has a shorter and distinct C-terminus, compared to isoform 1. Representative sequences of LILRB2 orthologs are presented below in Table 1.

[0228] Anti-LILRB2 antibodies suitable for detecting LILRB2 protein are well-known in the art and include, for example, antibodies sc-515288, and sc-390287 (Santa Cruz Biotechnology), antibodies MAB2078, AF2078, H00010288-M01, and NBP1-98554 (Novus Biologicals, Littleton, Colo.), antibodies ab128349, ab95819, and ab95820 (AbCam, Cambridge, Mass.), antibodies Cat #: TA349368 and TA323297 (Origene, Rockville, Md.), etc. In addition, reagents are well-known for detecting LILRB2 expression. Multiple clinical tests of LILRB2 are available in NIH Genetic Testing Registry (GTR®) (e.g., GTR Test ID: GTR000541153.2, offered by Fulgent Clinical Diagnostics Lab (Temple City, Calif.)). Moreover, multiple siRNA, shRNA, CRISPR constructs for reducing LILRB2 expression can be found in the commercial product lists of the above-referenced companies, such as siRNA product #SR323061, shRNA products #TL311729, TR311729, TG311729, TF311729, TL311729V and CRISPR products #KN207770 from Origene Technologies (Rockville, Md.), CRISPR gRNA products from Applied Biological Materials (K1215408) and from Santa Cruz (sc-401944), and RNAi products from Santa Cruz (Cat #sc-45200). It is to be noted that the term can further be used to refer to any combination of features described herein regarding LILRB2 molecules. For example, any combination of sequence composition, percentage identify, sequence length, domain structure, functional activity, etc. can be used to describe a LILRB2 molecule encompassed by the present invention.

[0229] The term “CCR5” refers to C—C Motif Chemokine Receptor 5, a member of the beta chemokine receptor family, which is predicted to be a seven transmembrane protein similar to G protein-coupled receptors. CCR5 is expressed by T cells and macrophages, and is known to be an important co-receptor for macrophage-tropic virus, including HIV, to enter host cells. Defective alleles of CCR5 gene have been associated with the HIV infection resistance. The ligands of CCR5 receptor include monocyte chemoattractant protein 2 (MCP-2), macrophage inflammatory protein 1 alpha (MIP-1 alpha), macrophage inflammatory protein 1 beta (MIP-1 beta) and regulated on activation normal T expressed and secreted protein (RANTES). Expression of CCR5 gene was also detected in a promyeloblastic cell line, indicating that this protein may play a role in granulocyte lineage proliferation and differentiation. The CCR5 gene is located at the chemokine receptor gene cluster region. Diseases associated with CCR5 include west nile virus and diabetes mellitus, insulin-dependent. Among its related pathways are cytokine signaling in immune system and akt signaling. In some embodiments, the CCR5 gene, located on chromosome 3p in humans, consists of 3 exons. Knockout mouse lines, including Ccr5^{tm1Kuz} (Huffnagle et al. (1999) J Immunol. 163:4642-4646), Ccr5^{tm1Blck} (Luckow et al. (2004) Eur J Immunol 34:2568-2578), and Ccr5^{tm1(CCR5)PfiHuman} (Amsellem et al. (2014) Circulation 130:880-891), exist. In some embodiments, CCR5 protein has 352 amino acids and/or a molecular mass of 40524 Da. The known binding partners of CCR5 include, e.g., PRAF2, CCL4, GRK2, ARRB1, ARRB2 and CNIH4.

[0230] The term “CCR5” is intended to include fragments, variants (e.g., allelic variants), and derivatives thereof. Representative human CCR5 cDNA and human CCR5 protein sequences are well-known in the art and are publicly available from the National Center for Biotechnology Information (NCBI) (see, for example, ncbi.nlm.nih.gov/gene/1234). For example, human CCR5 (NP_000570.1 and NP_001093638.1) is encodable by the transcript variant A (NM_000579.3), which is the longer transcript, and by the transcript variant B (NM_001100168.1), which differs in the 5′ UTR compared to variant A. Both variants encode the same protein. Nucleic acid and polypeptide sequences of CCR5 orthologs in organisms other than humans are well-known and include, for example, chimpanzee CCR5 (NM_001009046.1 and NP_001009046.1), rhesus monkey CCR5 (NM_001042773.3 and NP_001036238.2; and NM_001309402.1 and NP_001296331.1), dog CCR5 (NM_001012342.3 and NP_001012342.2), cattle CCR5 (NM_001011672.2 and NP_001011672.2), mouse CCR5 (NM_009917.5 and NP_034047.2), and rat CCR5 (NM_053960.3 and NP_446412.2). Representative sequences of CCR5 orthologs are presented below in Table 1.

[0231] Anti-CCR5 antibodies suitable for detecting CCR5 protein are well-known in the art and include, for example, antibodies GTX101330, GTX109635, and GTX21673 (GeneTex, Irvine, Calif.), antibodies sc-57072 and sc-55484 (Santa Cruz Biotechnology), antibodies MAB182, NBP2-31374, NBP1-41434, and MAB181 (Novus Biologicals, Littleton, Colo.), antibodies ab65850, ab1673, and ab7346 (AbCam, Cambridge, Mass.), antibodies Cat #: TA351039 and TA348418 (Origene, Rockville, Md.), etc. Other anti-CCR5 antibodies are also known and include, for example, those described in U.S. Pat. Pubis. US20010000241, US20020099176A1, US20090110686A1, and US20080107595. In addition, reagents are well-known for detecting CCR5 expression. Multiple clinical tests of CCR5 are available in NIH Genetic Testing Registry (GTR®) (e.g., GTR Test ID: GTR000516140.2, offered by Fulgent Clinical Diagnostics Lab (Temple City, Calif.)). Moreover, multiple siRNA, shRNA, CRISPR constructs for reducing CCR5 expression can be found in the commercial product lists of the above-referenced companies, such as siRNA product #SR300873, shRNA products #TL314126, TR314126, TG314126, TF 314126, TL314126V and CRISPR products #KN216008 from Origene Technologies (Rockville, Md.), CRISPR gRNA products from Applied Biological Materials (K6988308) and from Santa Cruz (sc-402548), and RNAi products from Santa Cruz (Cat #sc-35062 and sc-35063). It is to be noted that the term can further be used to refer to any combination of features described herein regarding CCR5 molecules. For example, any combination of sequence composition, percentage identify, sequence length, domain structure, functional activity, etc. can be used to describe a CCR5 molecule encompassed by the present invention.

[0232] The term “EVI2B” refers to Ecotropic Viral Integration Site 2B. EVI2B is required for granulocyte differentiation and functionality of hematopoietic progenitor cells through the control of cell cycle progression and survival of hematopoietic progenitor cells. In some embodiment, the gene EVI2B, located on chromosome 17q, consists of 3 exons. In some embodiments, human EVI2B protein has 448 amino acids and/or a molecular mass of 48666 Da.

[0233] The term “EVI2B” is intended to include fragments, variants (e.g., allelic variants), and derivatives thereof. Representative human EVI2B cDNA and human EVI2B protein sequences are well-known in the art and are publicly available from the National Center for Biotechnology Information (NCBI) (see, for example, ncbi.nlm.nih.gov/gene/2124). For example, human EVI2B (NP_006486.3) is encoded by the transcript (NM_006495.3). Nucleic acid and polypeptide sequences of EVI2B orthologs in organisms other than humans are well-known and include, for example, chimpanzee EVI2B (XM_024350668.1 and XP_024206436.1; and XM_001174747.4 and XP_001174747.1), rhesus monkey EVI2B (XM_001111968.3 and XP_00111968.1; and XM_001111891.3 and XP_001111891.1), dog EVI2B (XM_022423331.1 and XP_022279039.1; XM_022423330.1 and XP_022279038.1; XM_005624837.3 and XP_005624894.1; and XM_005624836.3 and XP_005624893.1), cattle EVI2B (NM_001099166.2 and NP_001092636.1), mouse EV12B (NM_001077496.1 and NP_001070964.1), and rat EVI2B (NM_001271482.1 and NP_001258411.1). Representative sequences of EVI2B orthologs are presented below in Table 1.

[0234] Anti-EVI2B antibodies suitable for detecting EVI2B protein are well-known in the art and include, for example, antibodies GTX79980, GTX79981, and GTX46414 (GeneTex, Irvine, Calif.), antibodies NBP1-85342, NBP2-62207, NBP1-59952, and H00002124-M02 (Novus Biologicals, Littleton, Colo.), antibodies ab101146, ab101040, and ab173149 (AbCam, Cambridge, Mass.), antibodies Cat #: TA341843 and AM12138RP-N (Origene, Rockville, Md.), etc. In addition, reagents are well-known for detecting EVI2B expression. Multiple clinical tests of EVI2B are available in NIH Genetic Testing Registry (GTR®) (e.g., GTR Test ID: GTR000535142.2, offered by Fulgent Clinical Diagnostics Lab (Temple City, Calif.)). Moreover, multiple siRNA, shRNA, CRISPR constructs for reducing EVI2B expression can be found in the commercial product lists of the above-referenced companies, such as siRNA product #SR320090, shRNA products #TL313146, TR313146, TG313146, TF313146, TL313146V and CRISPR products #KN203253 from Origene Technologies (Rockville, Md.), CRISPR gRNA products from Applied Biological Materials (K4066808) and from Santa Cruz (sc-416696), and RNAi products from Santa Cruz (Cat #sc-93673 and sc-144963). It is to be noted that the term can further be used to refer to any combination of features described herein regarding EVI2B molecules. For example, any combination of sequence composition, percentage identify, sequence length, domain structure, functional activity, etc. can be used to describe an EVI2B molecule encompassed by the present invention.

[0235] The term “CLEC7A” refers to C-Type Lectin Domain Containing 7A, which is a member of the C-type lectin/C-type lectin-like domain (CTL/CTLD) superfamily. The encoded glycoprotein is a small type II membrane receptor with an extracellular C-type lectin-like domain fold and a cytoplasmic domain with an immunoreceptor tyrosine-based activation motif. It functions as a pattern-recognition receptor that recognizes a variety of beta-1,3-linked and beta-1,6-linked glucans from fungi and plants, and in this way plays a role in innate immune response. This gene is closely linked to other CTL/CTLD superfamily members on chromosome 12p13 in humans in the natural killer gene complex region. Diseases associated with CLEC7A include aspergillosis and candidiasis, familial. Among its related pathways are CLEC7A (Dectin-1) signaling and innate immune system. In some embodiments, the gene CLEC7A, located on chromosome 12p, consists of 8 exons. Knockout mouse lines, including Clec7a^{tmlGdb} (Taylor et al. (2007) Nat Immunol 8:31-38), and Clec7a^{tm1Yiw} (Saijo et al. (2007) Nat Immumol. 8:39-46), exist. In some embodiments, human CLEC7A protein has 247 amino acids and/or a molecular mass of 27627 Da. CLEC7A protein interacts with SYK, and isoform 5 of CLEC7A interaects with RANBP9.

[0236] The term “CLEC7A” is intended to include fragments, variants (e.g., allelic variants), and derivatives thereof. Representative human CLEC7A cDNA and human CLEC7A protein sequences are well-known in the art and are publicly available from the National Center for Biotechnology Information (NCBI) (see, for example, ncbi.nlm.nih.gov/gene/64581). For example, at least six different human CLEC7A isoforms are known. Human CLEC7A isoform a (NP_922938.1) is encodable by the transcript variant 1 (NM_197947.2), which is the longest transcript. Human CLEC7A isoform b (NP_072092.2) is encodable by the transcript variant 2 (NM_022570.4), lacks an alternate in-frame exon compared to variant 1, resulting in a shorter protein (isoform b) compared to isoform a. Human CLEC7A isoform c (NP_922939.1) is encodable by the transcript variant 3 (NM_197948.2), which lacks an alternate exon, which results in a frameshift and an early stop codon, compared to variant 1. The resulting protein (isoform c) is shorter and has a distinct C-terminus, compared to isoform a. Human CLEC7A isoform d (NP_922940.1) is encodable by the transcript variant 4 (NM_197949.2), which lacks two alternate exons, which results in a frameshift and an early stop codon, compared to variant 1. The resulting protein (isoform d) is shorter and contains a distinct C-terminus, compared to isoform a. Human CLEC7A isoform e (NP_922941.1) is encodable by the transcript variant 5 (NM_197950.2), which lacks an alternate in-frame exon compared to variant 1, resulting in a shorter protein (isoform e) compared to isoform a. Human CLEC7A isoform f (NP_922945.1) is encodable by the transcript variant 6 (NM_197954.2), has multiple differences in the coding region, compared to variant 1, one of which results in an early stop codon. The resulting protein (isoform f) has a distinct C-terminus and is much shorter than isoform a. Nucleic acid and polypeptide sequences of CLEC7A orthologs in organisms other than humans are well-known and include, for example, chimpanzee CLEC7A (XM_016922965.2 and XP_016778454.1; XM_001144689.3 and XP_001144689.1; XM_001144825.3 and XP_001144825.1; XM_003313487.4 and XP_003313535.1; XM_528732.4 and XP_528732.2; and XM_001144313.4 and XP_001144313.1), rhesus monkey CLEC7A (NM_001032943.1 and NP_001028115.1), dog CLEC7A (XM_022411028.1 and XP_022266736.1; XM_849050.3 and XP_854143.1; and XM_005637163.2 and XP_005637220.1), cattle CLEC7A (NM_001031852.1 and NP_001027022.1), mouse CLEC7A (NM_001309637.1 and NP_001296566.1; and NM_020008.3 and NP_064392.2), and rat CLEC7A (NM_001173386.1 and NP_001166857.1). Representative sequences of CLEC7A orthologs are presented below in Table 1.

[0237] Anti-CLEC7A antibodies suitable for detecting CLEC7A protein are well-known in the art and include, for example, antibodies GTX41467, GTX41471, and GTX41466 (GeneTex, Irvine, Calif.), antibodies MAB1859, AF1859, NBP1-45514, and NBP2-41170 (Novus Biologicals, Littleton, Colo.), antibodies ab140039, ab82888, and ab189968 (AbCam, Cambridge, Mass.), antibodies Cat #: TA322197 and TA320003 (Origene, Rockville, Md.), etc. Other anti-CLEC7A antibodies are also known and include, for example, those described in U.S. Pat. Pubis. US20140322214A1 and US20170095573A1, and U.S. Pat. Nos. 7,915,041B2. In addition, reagents are well-known for detecting CLEC7A expression. Multiple clinical tests of CLEC7A are available in NIH Genetic Testing Registry (GTR®) (e.g., GTR Test ID: GTR000516241.2, offered by Fulgent Clinical Diagnostics Lab (Temple City, Calif.)). Moreover, multiple siRNA, shRNA, CRISPR constructs for reducing CLEC7A expression can be found in the commercial product lists of the above-referenced companies, such as siRNA product #SR312068, shRNA products #TL305354, TR305354, TG305354, TF305354, TL305354V and CRISPR products #KN214107 from Origene Technologies (Rockville, Md.), CRISPR gRNA products from Applied Biological Materials (K6685408) and from Santa Cruz (sc-417053), and RNAi products from Santa Cruz (Cat #sc-63276 and sc-63277). It is to be noted that the term can further be used to refer to any combination of features described herein regarding CLEC7A molecules. For example, any combination of sequence composition, percentage identify, sequence length, domain structure, functional activity, etc. can be used to describe a CLEC7A molecule encompassed by the present invention.

[0238] The term “TBXAS” refers to Thromboxane A Synthase 1, which is a member of the cytochrome P450 superfamily of enzymes. The cytochrome P450 proteins are monooxygenases which catalyze many reactions involved in drug metabolism and synthesis of cholesterol, steroids and other lipids. However, this protein is considered a member of the cytochrome P450 superfamily on the basis of sequence similarity rather than functional similarity. This endoplasmic reticulum membrane protein catalyzes the conversion of prostglandin H2 to thromboxane A2, a potent vasoconstrictor and inducer of platelet aggregation. The enzyme plays a role in several pathophysiological processes including hemostasis, cardiovascular disease, and stroke. Diseases associated with TBXAS1 include ghosal hematodiaphyseal dysplasia and bleeding disorder, platelet-type, 14. Among its related pathways are platelet activation and metabolism. In some embodiments, the gene TBXAS1, located on chromosome 7q, consists of 23 exons. Knockout mouse lines, including Tbxas1^{tmlSwl} (Yu et al. (2004) Blood 104:135-142), and Tbxas1^{tmlOkunHuman} (Matsunobu et al. (2013) J Lipid Res 54:2979-2987), exist. In some embodiments, TBXAS1 protein has 533 amino acids and/or a molecular mass of 60518 Da.

[0239] The term “TBXAS1” is intended to include fragments, variants (e.g., allelic variants), and derivatives thereof. Representative human TBXAS1 cDNA and human TBXAS1 protein sequences are well-known in the art and are publicly available from the National Center for Biotechnology Information (NCBI) (see, for example, ncbi.nlm.nih.gov/gene/6916). For example, at least five different human TBXAS1 isoforms are known. Human TBXAS1 isoform 1 (NP_001052.2 and NP_001124438.1) is encodable by the transcript variant 1 (NM_001061.4) and transcript variant 3 (NM_001130966.2). This variant (3, also known as TXS-III) differs in the 5′ UTR, compared to variant 1. Both variants 1 and 3 encode the same isoform (1, also known as isoform TXS-I). Human TBXAS1 isoform 2 (NP_112246.2) is encodable by the transcript variant 2 (NM_030984.3), which lacks an alternate exon in the 3′ coding region that encodes the heme binding site, compared to transcript variant 1. The encoded isoform (2, also known as isoform TXS-II) lacks thromboxane A synthase activity, has a distinct C-terminus, and is shorter than isoform 1. Human TBXAS1 isoform 3 (NP_001159725.1) is encodable by the transcript variant 4 (NM_001166253.1), which includes an alternate in-frame exon in the central coding region, compared to variant 1, resulting in an isoform (3) that is longer than isoform 1. Human TBXAS isoform 4 (NP_001159726.1) is encodable by the transcript variant 5 (NM_001166254.1), which differs in the 5′ UTR, lacks a portion of the 5′ coding region, and uses a downstream translational start codon, compared to variant 1. The encoded isoform (4) is shorter at the N-terminus, compared to isoform 1. Human TBXAS1 isoform 5 (NP_001300957.1) is encodable by the transcript variant 6 (NM_001314028.1), which uses an alternate splice site in an internal exon, compared to variant 1. The resulting isoform (5) has a shorter and distinct N-terminus compared to isoform 1. Nucleic acid and polypeptide sequences of TBXAS1 orthologs in organisms other than humans are well-known and include, for example, dog TBXAS1 (XM_005629559.2 and XP_005629616.1; XM_539887.5 and XP_539887.2; XM_014119949.2 and XP_013975424.1; and XM_022403739.1 and XP_022259447.1), cattle TBXAS1 (NM_001046027.2 and NP_001039492.1), mouse TBXAS1 (NM_011539.3 and NP_035669.3), rat TBXAS1 (NM_012687.1 and NP_036819.1), chicken TBXAS1 (XM_416334.6 and XP_416334.4; XM_004937846.3 and XP_004937903.2; and XM_025155784.1 and XP_025011552.1), tropical clawed frog TBXAS1 (NM_001171526.1 and NP_001164997.1), and zebrafish TBXAS1 (NM_205609.2 and NP_991172.2). Representative sequences of TBXAS1 orthologs are presented below in Table 1.

[0240] Anti-TBXAS1 antibodies suitable for detecting TBXAS1 protein are well-known in the art and include, for example, antibodies GTX83523, GTX83521, and GTX83522 (GeneTex, Irvine, Calif.), antibodies NBP2-02710, NBP2-33948, NBP2-33946, and NBP2-33947 (Novus Biologicals, Littleton, Colo.), antibodies ab39362, ab187176, and ab157481 (AbCam, Cambridge, Mass.), antibodies Cat #: CF501380 and AP51174PU-N(Origene, Rockville, Md.), etc. In addition, reagents are well-known for detecting TBXAS1 expression. Multiple clinical tests of TBXAS1 are available in NIH Genetic Testing Registry (GTR®) (e.g., GTR Test ID: GTR000518496.2, offered by Fulgent Clinical Diagnostics Lab (Temple City, Calif.)). Moreover, multiple siRNA, shRNA, CRISPR constructs for reducing TBXAS1 expression can be found in the commercial product lists of the above-referenced companies, such as siRNA product #SR304732, shRNA products #TL301186, TR301186, TG301186, TF301186, TL301186V and CRISPR products #KN208028 from Origene Technologies (Rockville, Md.), CRISPR gRNA products from Applied Biological Materials (K6806708) and from Santa Cruz (sc-418609), and RNAi products from Santa Cruz (Cat #sc-62451 and sc-76779). It is to be noted that the term can further be used to refer to any combination of features described herein regarding TBXAS1 molecules. For example, any combination of sequence composition, percentage identify, sequence length, domain structure, functional activity, etc. can be used to describe a TBXAS1 molecule encompassed by the present invention.

[0241] The term “SIGLEC7” refers to Sialic Acid Binding Ig Like Lectin 7, which is a putative adhesion molecule that mediates sialic-acid dependent binding to cells. SIGLEC7 preferentially binds to alpha-2,3- and alpha-2,6-linked sialic acid. SIGLEC7 also binds disialogangliosides (disialogalactosyl globoside, disialyl lactotetraosylceramide and disialyl GalNAc lactotetraoslylceramide). The sialic acid recognition site of SIGLEC7 may be masked by cis interactions with sialic acids on the same cell surface. In the immune response, SIGLEC7 may act as an inhibitory receptor upon ligand induced tyrosine phosphorylation by recruiting cytoplasmic phosphatase(s) via their SH2 domain(s) that block signal transduction through dephosphorylation of signaling molecules. SIGLEC7 mediates inhibition of natural killer cells cytotoxicity. SIGLEC7 may play a role in hemopoiesis. SIGLEC7 inhibits differentiation of CD34+ cell precursors towards myelomonocytic cell lineage and proliferation of leukemic myeloid cells in vitro. Diseases associated with SIGLEC7 include pheochromocytoma. Among its related pathways are hematopoietic stem cell differentiation pathways and lineage-specific markers and innate immune system. In some embodiments, the gene SIGLEC7, located on chromosome 19q, consists of 7 exons. In some embodiments, human SIGLEC7 protein has 467 amino acids and/or a molecular mass of 51143 Da. In some embodiments, SIGLEC7 protein contains 1 copy of a cytoplasmic motif that is referred to as the immunoreceptor tyrosine-based inhibitor motif (ITIM). This motif is involved in modulation of cellular responses. The phosphorylated ITIM motif can bind the SH2 domain of several SH2-containing phosphatases. SIGLEC7 protein interacts with PTPN6/SHP-1 upon phosphorylation.

[0242] The term “SIGLEC7” is intended to include fragments, variants (e.g., allelic variants), and derivatives thereof. Representative human SIGLEC7 cDNA and human SIGLEC7 protein sequences are well-known in the art and are publicly available from the National Center for Biotechnology Information (NCBI) (see, for example, ncbi.nlm.nih.gov/gene/27036). For example, at least three different human SIGLEC7 isoforms are known. Human SIGLEC7 isoform 1 (NP_055200.1), the longest isoform, is encodable by the transcript variant 1 (NM_014385.3). Human SIGLEC7 isoform 2 (NP_057627.2) is encodable by the transcript variant 2 (NM_016543.3), which lacks an in-frame coding exon, compared to variant 1. The resulting isoform (2) lacks an internal segment, compared to isoform 1. Human SIGLEC7 isoform 3 (NP_001264130.1) is encodable by the transcript variant 3 (NM_001277201.1), which lacks all internal coding exons, compared to variant 1. The resulting isoform (3) is C-terminal truncated, compared to isoform 1. Nucleic acid and polypeptide sequences of SIGLEC7 orthologs in organisms other than humans are well-known and include, for example, chimpanzee SIGLEC7 (XM_016936700.1 and XP_016792189.1; and XM_016936701.1 and XP_016792190.1). Representative sequences of SIGLEC7 orthologs are presented below in Table 1.

[0243] Anti-SIGLEC7 antibodies suitable for detecting SIGLEC7 protein are well-known in the art and include, for example, antibodies GTX107080, GTX116337, and GTX53005 (GeneTex, Irvine, Calif.), antibodies sc-398919 and sc-398181 (Santa Cruz Biotechnology), antibodies AF1138, MAB1138, MAB11381, and NBP2-20360 (Novus Biologicals, Littleton, Colo.), antibodies ab38573, ab38574, and ab111619 (AbCam, Cambridge, Mass.), antibodies Cat #: AM05592FC-N and AM05592PU-L (Origene, Rockville, Md.), etc. Other anti-SIGLEC7 antibodies are also known and include, for example, those described in U.S. Pat. Pubs. US20170306014, US20190085077, US20190023786, and US20180244770. In addition, reagents are well-known for detecting SIGLEC7 expression. Multiple clinical tests of SIGLEC7 are available in NIH Genetic Testing Registry (GTR®) (e.g., GTR Test ID: GTR000546879.2, offered by Fulgent Clinical Diagnostics Lab (Temple City, Calif.)). Moreover, multiple siRNA, shRNA, CRISPR constructs for reducing SIGLEC7 expression can be found in the commercial product lists of the above-referenced companies, such as siRNA product #SR308944, shRNA products #TL309445, TR309445, TG309445, TF309445, TL309445V and CRISPR products #KN206995 from Origene Technologies (Rockville, Md.), CRISPR gRNA products from Applied Biological Materials (K2147608) and from Santa Cruz (sc-407464), and RNAi products from Santa Cruz (Cat #sc-106757 and sc-106757-SH). It is to be noted that the term can further be used to refer to any combination of features described herein regarding SIGLEC7 molecules. For example, any combination of sequence composition, percentage identify, sequence length, domain structure, functional activity, etc. can be used to describe a SIGLEC7 molecule encompassed by the present invention.

[0244] The term “DOCK2” refers to Dedicator Of Cytokinesis 2. DOCK2 belongs to the CDM protein family. It is specifically expressed in hematopoietic cells and is predominantly expressed in peripheral blood leukocytes. The protein is involved in remodeling of the actin cytoskeleton required for lymphocyte migration in response to chemokine signaling. It activates members of the Rho family of GTPases, for example RAC1 and RAC2, by acting as a guanine nucleotide exchange factor (GEF) to exchange bound GDP for free GTP. DOCK2 is involved in cytoskeletal rearrangements required for lymphocyte migration in response of chemokines. DOCK2 activates RAC1 and RAC2, but not CDCl42, by functioning as a guanine nucleotide exchange factor (GEF), which exchanges bound GDP for free GTP. DOCK2 also participates in IL2 transcriptional activation via the activation of RAC2. Knockout mouse lines, called Dock2^{TmlTsas} (Fukui et al. (2001) Nature 412:826-831), and Dock2^{tmlYsfk} (Kunisaki et al. (2006) J Cell Biol 174:647-652), exist. In some embodiments, the gene DOCK2, located on chromosome 5q in humans, consists of 59 exons. The DOCK2 gene is conserved in chimpanzee, dog, cow, mouse, rat, chicken, and frog. In some embodiments, human DOCK2 protein has 1830 amino acids and/or a molecular mass of 211948 Da. The known binding partners of DOCK2 include, e.g., RAC1, RAC2, CRKL, VAV, and CD3Z.

[0245] The term “DOCK2” is intended to include fragments, variants (e.g., allelic variants), and derivatives thereof. Representative human DOCK2 cDNA and human DOCK2 protein sequences are well-known in the art and are publicly available from the National Center for Biotechnology Information (NCBI) (see, for example, ncbi.nlm.nih.gov/gene/80231). For example, human DOCK2 (NP_004937.1) is encodable by the transcript (NM_004946.3). Nucleic acid and polypeptide sequences of DOCK2 orthologs in organisms other than humans are well-known and include, for example, chimpanzee DOCK2 (XM_016954161.2 and XP_016809650.1; XM_016954163.2 and XP_016809652.1; XM_016954162.2 and XP_016809651.1; and XM_016954164.2 and XP_016809653.1), dog DOCK2 (XM_546246.5 and XP_546246.3), cattle DOCK2 (XM_024981420.1 and XP_024837188.1 and XM_024981421.1 and XP_024837189.1), mouse DOCK2 (NM_033374.3 and NP_203538.2), rat DOCK2 (XM_008767630.2 and XP_008765852.1), chicken DOCK2 (XM_425184.6 and XP_425184.4), and tropical clawed frog DOCK2 (XM_018092631.1 and XP_017948120.1). Representative sequences of DOCK2 orthologs are presented below in Table 1.

[0246] Anti-DOCK2 antibodies suitable for detecting DOCK2 protein are well-known in the art and include, for example, antibodies TA340057 and TA802698 (OriGene, Rockville, Md.), antibodies NBP2-46468 and NBP2-38303 (Novus Biologicals, Littleton, Colo.), antibodies ab74659, ab226797, and ab203068 (AbCam, Cambridge, Mass.), etc. In addition, reagents are well-known for detecting DOCK2 expression. Multiple clinical tests of DOCK2 are available in NIH Genetic Testing Registry (GTR®) (e.g., GTR Test ID: GTR000536814.1, offered by Fulgent Clinical Diagnostics Lab (Temple City, Calif.)). Moreover, multiple siRNA, shRNA, CRISPR constructs for reducing DOCK2 expression can be found in the commercial product lists of the above-referenced companies, such as siRNA product #SR301250, shRNA products #TL313396, TR313396, TG313396, TF313396, TL313396V and CRISPR products #KN211198 from Origene Technologies (Rockville, Md.), CRISPR gRNA products from Applied Biological Materials (K3865908) and from Santa Cruz (sc-407692), and RNAi products from Santa Cruz (Cat #sc-60545 and sc-60546). It is to be noted that the term can further be used to refer to any combination of features described herein regarding DOCK2 molecules. For example, any combination of sequence composition, percentage identify, sequence length, domain structure, functional activity, etc. can be used to describe a DOCK2 molecule encompassed by the present invention.

[0247] The term “CD53” refers to CD53 molecule, which is a member of the transmembrane 4 superfamily, also known as the tetraspanin family. Most of these members are cell-surface proteins that are characterized by the presence of four hydrophobic domains. The proteins mediate signal transduction events that play a role in the regulation of cell development, activation, growth and motility. This encoded protein is a cell surface glycoprotein that is known to complex with integrins. It contributes to the transduction of CD2-generated signals in T cells and natural killer cells and has been suggested to play a role in growth regulation. Familial deficiency of this gene has been linked to an immunodeficiency associated with recurrent infectious diseases caused by bacteria, fungi and viruses. Diseases associated with CD53 include intestinal tuberculosis and gastrointestinal tuberculosis. Among its related pathways are innate immune system. CD53 is required for efficient formation of myofibers in regenerating muscle at the level of cell fusion. CD53 may be involved in growth regulation in hematopoietic cells. In some embodiments, the gene CD53, located on chromosome 1p, consists of 9 exons. In some embodiments, human CD53 protein has 219 amino acids and/or a molecular mass of 24341 Da.

[0248] The term “CD53” is intended to include fragments, variants (e.g., allelic variants), and derivatives thereof. Representative human CD53 cDNA and human CD53 protein sequences are well-known in the art and are publicly available from the National Center for Biotechnology Information (NCBI) (see, for example, ncbi.nlm.nih.gov/gene/963). For example, at least two different human CD53 isoforms are known. Human CD53 isoform 1 (NP_000551.1 and NP_001035122.1) is encodable by the transcript variant 1 (NM_001040033.1), which represents the longer transcript, and by the transcript variant 2 (NM_000560.3), which differs in the 5′ UTR, compared to variant 1. Variants 1 and 2 encode the same protein. Human CD53 isoform 2 (NP_001307567.1) is encodable by the transcript variant 3 (NM_001320638.1), which differs in the 5′ UTR and lacks exons in the coding region, compared to variant 1. The encoded isoform (2) is shorter, compared to isoform 1. Nucleic acid and polypeptide sequences of CD53 orthologs in organisms other than humans are well-known and include, for example, chimpanzee CD53 (XM_003308334.3 and XP_003308382.1; XM_016925800.1 and XP_016781289.1; and XM_009429624.2 and XP_009427899.1), rhesus monkey CD53 (XM_015148031.1 and XP_015003517.1, XM_001102190.3 and XP_001102190.1, and XM_015148036.1 and XP_015003522.1), dog CD53 (XM_003639132.3 and XP_003639180.1), cattle CD53 (NM_001034232.2 and NP_001029404.1), mouse CD53 (NM_007651.3 and NP_031677.1), and rat CD53 (NM_012523.2 and NP_036655.1). Representative sequences of CD53 orthologs are presented below in Table 2.

[0249] Anti-CD53 antibodies suitable for detecting CD53 protein are well-known in the art and include, for example, antibodies GTX34220, GTX79940, and GTX79942 (GeneTex, Irvine, Calif.), antibodies sc-390185 and sc-73365 (Santa Cruz Biotechnology), antibodies MAB4624, NB500-393, NBP2-44609, and NBP2-14464 (Novus Biologicals, Littleton, Colo.), antibodies ab134094, ab68565, and ab213083 (AbCam, Cambridge, Mass.), antibodies Cat #: SM1137AS and SM1137LE (Origene, Rockville, Md.), etc. In addition, reagents are well-known for detecting CD53 expression. Multiple clinical tests of CD53 are available in NIH Genetic Testing Registry (GTR®) (e.g., GTR Test ID: GTR000532965.2, offered by Fulgent Clinical Diagnostics Lab (Temple City, Calif.)). Moreover, multiple siRNA, shRNA, CRISPR constructs for reducing CD53 expression can be found in the commercial product lists of the above-referenced companies, such as siRNA product #SR300686, shRNA products #TL314077, TR314077, TG314077, TF314077, TL314077V and CRISPR products #KN208095 from Origene Technologies (Rockville, Md.), CRISPR gRNA products from Applied Biological Materials (K6868708) and from Santa Cruz (sc-405861), and RNAi products from Santa Cruz (Cat #sc-42796 and sc-42797). It is to be noted that the term can further be used to refer to any combination of features described herein regarding CD53 molecules. For example, any combination of sequence composition, percentage identify, sequence length, domain structure, functional activity, etc. can be used to describe a CD53 molecule encompassed by the present invention.

[0250] The term “FERMT3” refers to Fermitin Family Member 3 and belongs to a small family of proteins that mediate protein-protein interactions involved in integrin activation and thereby have a role in cell adhesion, migration, differentiation, and proliferation. FERMT3 protein has a key role in the regulation of hemostasis and thrombosis. It may also help maintain the membrane skeleton of erythrocytes. Mutations in FERMT3 gene cause the autosomal recessive leukocyte adhesion deficiency syndrome-III (LAD-III). FERMT3 plays a central role in cell adhesion in hematopoietic cells (Svensson et al. (2009) Nat Med 15:306-312; Suratannon et al. (2016) Pediatr Allergy Immunol 27:214-217). FERMT3 acts by activating the integrin beta-1-3 (ITGB1, ITGB2 and ITGB3). FERMT3 is required for integrin-mediated platelet adhesion and leukocyte adhesion to endothelial cells (Malinin et al. (2009) Nat Med 15:313-318), and for activation of integrin beta-2 (ITGB2) in polymorphonuclear granulocytes (PMNs). Human isoform 2 of FERMT3 may act as a repressor of NF-kappa-B and apoptosis. In some embodiments, the gene FERMT3, located on chromosome 11q, consists of 16 exons. Knockout mouse lines, including Fermt3^{tmlRef} (Moser et al. (2008) Nat Med. 14:325-330), Fermt3^{tm2.Ref} (Cohen et al. (2013) Blood 122:2609-2617), and Fermt3^{tmlb(KOMP)Wtsi} (International Knockout Mouse Consortium), exist. In some embodiments, human FERMT3 protein has 667 amino acids and/or a molecular mass of 75953 Da. FERMT3 interacts with ITGB1, ITGB2 and ITGB3 via cytoplasmic tails.

[0251] The term “FERMT3” is intended to include fragments, variants (e.g., allelic variants), and derivatives thereof. Representative human FERMT3 cDNA and human FERMT3 protein sequences are well-known in the art and are publicly available from the National Center for Biotechnology Information (NCBI) (see, for example, ncbi.nlm.nih.gov/gene/83706). For example, at least two different human FERMT3 isoforms are known. Human FERMT3 isoform 1 (NP_848537.1) is encodable by the transcript variant 1 (NM_178443.2), which represents the longer transcript. Human FERMT3 isoform 2 (NP_113659.3) is encodable by the transcript variant 2 (NM_031471.5), which uses an alternate in-frame splice junction at the 5′ end of a coding exon compared to variant 1. The resulting isoform (2) has the same N- and C-termini but is shorter compared to the long isoform (1). Nucleic acid and polypeptide sequences of FERMT3 orthologs in organisms other than humans are well-known and include, for example, chimpanzee FERMT3 (XM_009423350.3 and XP_009421625.1; and XM_508522.6 and XP_508522.3), rhesus monkey FERMT3 (XM_015113900.1 and XP_014969386.1, and XM_015113898.1 and XP_014969384.1), dog FERMT3 (XM_003639655.3 and XP_003639703.1), mouse FERMT3 (NM_001362399.1 and NP_001349328.1, and NM_153795.2 and NP_722490.1), rat FERMT3 (NM_001127543.1 and NP_001121015.1); and zebrafsh FERMT3 (NM_200904.2 and NP_957198.2). Representative sequences of FERMT3 orthologs are presented below in Table 2.

[0252] Anti-FERMT3 antibodies suitable for detecting FERMT3 protein are well-known in the art and include, for example, antibodies GTX116828, GTX85027, and GTX88332 (GeneTex, Irvine, Calif.), antibodies NBP2-45641, AF7004, NBP2-20821, and H00083706-B01P (Novus Biologicals, Littleton, Colo.), antibodies ab68040, ab126900, and ab173416 (AbCam, Cambridge, Mass.), antibodies Cat #: CF807994 and TA807994 (Origene, Rockville, Md.), etc. In addition, reagents are well-known for detecting FERMT3 expression. Multiple clinical tests of FERMT3 are available in NIH Genetic Testing Registry (GTR®) (e.g., GTR Test ID: GTR000516681.2, offered by Fulgent Clinical Diagnostics Lab (Temple City, Calif.)). Moreover, multiple siRNA, shRNA, CRISPR constructs for reducing FERMT3 expression can be found in the commercial product lists of the above-referenced companies, such as siRNA product #SR313216, shRNA products #TL307798, TR307798, TG307798, TF307798, TL307798V and CRISPR products #KN202580 from Origene Technologies (Rockville, Md.), CRISPR gRNA products from Applied Biological Materials (K7584608) and from Santa Cruz (sc-408381), and RNAi products from Santa Cruz (Cat #sc-96761 and sc-146483). It is to be noted that the term can further be used to refer to any combination of features described herein regarding FERMT3 molecules. For example, any combination of sequence composition, percentage identify, sequence length, domain structure, functional activity, etc. can be used to describe a FERMT3 molecule encompassed by the present invention.

[0253] The term “CD37” refers to CD37, which is a member of the transmembrane 4 superfamily, also known as the tetraspanin family. Most of these members are cell-surface proteins that are characterized by the presence of four hydrophobic domains. The proteins mediate signal transduction events that play a role in the regulation of cell development, activation, growth and motility. CD37 protein is a cell surface glycoprotein that is known to complex with integrins and other transmembrane 4 superfamily proteins. CD37 may play a role in T-cell-B-cell interactions. A knockout mouse line, called CD37^{tm1Hor}, exists (Knobeloch et al. (2000) Mol Cell Biol 20:5363-5369). In some embodiments, the gene CD37, located on chromosome 19q, consists of 8 exons. In some embodiments, human CD37 protein has 281 amino acids and/or a molecular mass of 31703 Da. In some embodiments, CD37 interacts with SCIMP.

[0254] The term “CD37” is intended to include fragments, variants (e.g., allelic variants), and derivatives thereof. Representative human CD37 cDNA and human CD37 protein sequences are well-known in the art and are publicly available from the National Center for Biotechnology Information (NCBI) (see, for example, ncbi.nlm.nih.gov/gene/951). For example, at least two different human CD37 isoforms are known. Human CD37 isoform A (NP_001765.1) is encodable by the transcript variant 1 (NM_001774.2), which represents the longer transcript. Human CD37 isoform B (NP_001035120.1) is encodable by the transcript variant 2 (NM_001040031.1), which lacks an alternate in-frame segment in the 5′ coding region and uses a downstream start codon, compared to variant 1. The encoded isoform (B) has a shorter N-terminus, compared to isoform A. Nucleic acid and polypeptide sequences of CD37 orthologs in organisms other than humans are well-known and include, for example, chimpanzee CD37 (XM_016947061.2 and XP_016802550.1; XM_016947063.2 and XP_016802552.1; XM_016947062.2 and XP_016802551.1; and XM_016947064.2 and XP_016802553.1), rhesus monkey CD37 (XM_015124560.1 and XP_014980046.1; XM_001114865.3 and XP_001114865.2; XM_015124562.1 and XP_014980048.1; and XM_015124563.1 and XP_014980049.1), dog CD37 (XM_014118925.2 and XP_013974400.1; XM_541497.5 and XP_541497.2; and XM_005616317.3 and XP_005616374.1), cattle CD37 (NM_001046011.2 and NP_001039476.1), mouse CD37 (NM_001290802.1 and NP_001277731.1, NM_001290804.1 and NP_001277733.1, and NM_007645.4 and NP_031671.1), rat CD37 (NM_017124.1 and NP_058820.1), and tropical clawed frog CD37 (NM_001015801.2 and NP_001015801.2). Representative sequences of CD37 orthologs are presented below in Table 2.

[0255] Anti-CD37 antibodies suitable for detecting CD37 protein are well-known in the art and include, for example, antibodies GTX129598, GTX19701, and GTX83137 (GeneTex, Irvine, Calif.), antibodies sc-73364 and sc-23924 (Santa Cruz Biotechnology), antibodies NBP1-28869, NBP2-33969, NBP2-33970, and MAB4625 (Novus Biologicals, Littleton, Colo.), antibodies ab170238, ab213068, and ab227624 (AbCam, Cambridge, Mass.), antibodies Cat #: AM06314SU-N and AM32392PU-N(Origene, Rockville, Md.), etc. Other anti-CD37 antibodies are also known and include, for example, those described in U.S. Pat. Publs. US20160051694A1, US20100189722, US20180186876, and US20140348745, and U.S. Pat. Nos. 8,333,966B2 and 8,765,917B2. In addition, reagents are well-known for detecting CD37 expression. Multiple clinical tests of CD37 are available in NIH Genetic Testing Registry (GTR®) (e.g., GTR Test ID: GTR000532008.2, offered by Fulgent Clinical Diagnostics Lab (Temple City, Calif.)). Moreover, multiple siRNA, shRNA, CRISPR constructs for reducing CD37 expression can be found in the commercial product lists of the above-referenced companies, such as siRNA product #SR300873, shRNA products #TL314089, TR314089, TG314089, TF314089, TL314089V and CRISPR products #KN210768 from Origene Technologies (Rockville, Md.), CRISPR gRNA products from Applied Biological Materials (K6910708) and from Santa Cruz (sc-404423), and RNAi products from Santa Cruz (Cat #sc-42784 and sc-44663). It is to be noted that the term can further be used to refer to any combination of features described herein regarding CD37 molecules. For example, any combination of sequence composition, percentage identify, sequence length, domain structure, functional activity, etc. can be used to describe a CD37 molecule encompassed by the present invention.

[0256] The term “CXorf21” refers to Chromosome X Open Reading Frame 21. In some embodiments, the gene CXorf21, located on chromosome Xp in humans, consists of 3 exons. The CXorf21 gene is conserved in chimpanzee, rhesus monkey, dog, cow, mouse, rat, chicken, zebrafish, and frog. In some embodiments, human CXorf21 protein has 301 amino acids and/or a molecular mass of 33894 Da.

[0257] The term “CXorf21” is intended to include fragments, variants (e.g., allelic variants), and derivatives thereof. Representative human CXorf21 cDNA and human CXorf21 protein sequences are well-known in the art and are publicly available from the National Center for Biotechnology Information (NCBI) (see, for example, ncbi.nlm.nih.gov/gene/80231). For example, human CXorf21 (NP_079435.1) is encodable by the transcript (NM_025159.2). Nucleic acid and polypeptide sequences of CXorf21 orthologs in organisms other than humans are well-known and include, for example, chimpanzee CXorf21 (XM_001134922.2 and XP_001134922.1), rhesus monkey CXorf21 (NM_001194018.1 and NP_001180947.1), dog CXorf21 (XM_005641222.3 and XP_005641279.1; XM_005641223.3 and XP_005641280.1; XM_022416085.1 and XP_022271793.1; and XM_022416084.1 and XP_022271792.1), cattle CXorf21 (NM_001038537.2 and NP_001033626.1), mouse CXorf21 (NM_001163539.1 and NP_001157011.1), rat CXorf21 (NM_001109318.1 and NP_001102788.1), and chicken CXorf21 (XM_003640512.4 and XP_003640560.1). Representative sequences of CXorf21 orthologs are presented below in Table 2.

[0258] Anti-CXorf21 antibodies suitable for detecting CXorf21 protein are well-known in the art and include, for example, antibodies NBP1-82317 and H00080231-B01P (Novus Biologicals, Littleton, Colo.), antibody ab69152 (AbCam, Cambridge, Mass.), etc. In addition, reagents are well-known for detecting CXorf21 expression. Multiple clinical tests of CXorf21 are available in NIH Genetic Testing Registry (GTR®) (e.g., GTR Test ID: GTR000537724.2, offered by Fulgent Clinical Diagnostics Lab (Temple City, Calif.)). Moreover, multiple siRNA, shRNA, CRISPR constructs for reducing CXorf21 expression can be found in the commercial product lists of the above-referenced companies, such as siRNA product #SR312858, shRNA products #TL314126, TR305156, TG305156, TF305156, TL305156V and CRISPR products #KN204618 and KN300469 from Origene Technologies (Rockville, Md.), CRISPR gRNA products from Applied Biological Materials (K0537008) and from Santa Cruz (sc-413367), and RNAi products from Santa Cruz (Cat #sc-91192 and sc-140364). It is to be noted that the term can further be used to refer to any combination of features described herein regarding CXorf21 molecules. For example, any combination of sequence composition, percentage identify, sequence length, domain structure, functional activity, etc. can be used to describe a CXorf21 molecule encompassed by the present invention.

TABLE 1
SIGLEC9
VSIG4
CD74
CD207
LRRC25
SELPLG
AIF1
CD84
IGSF6
CD48
CD33
LST1
TNFAIP8L2 (TIPE2)
SPI1 (PU.1)
LILRB2
CCR5
EVI2B
CLEC7A
TBXAS1
SIGLEC7
DOCK2
SEQ ID NO: 1 Human SIGLEC9 Transcript Variant 1 cDNA Sequence
(NM_001198558.1; CDS: 96-1535)

| | |
|---|---|
| 1 | tagggcctcc tctaagtctt gagcccgcag ttcctgagag aagaaccctg aggaacagac |
| 61 | gttccctcgc ggccctggca cctctaaccc cagacatgct gctgctgctg ctgcccctgc |
| 121 | tctgggggag ggagagggcg gaaggacaga caagtaaact gctgacgatg cagagttccg |
| 181 | tgacggtgca ggaaggcctg tgtgtccatg tgccctgctc cttctcctac ccctcgcatg |
| 241 | gctggattta ccctggccca gtagttcatg gctactggtt ccgggaaggg gccaatacag |
| 301 | accaggatgc tccagtggcc acaaacaacc cagctcgggc agtgtgggag gagactcggg |
| 361 | accgattcca cctccttggg gacccacata ccaagaattg caccctgagc atcagagatg |
| 421 | ccagaagaag tgatgcgggg agatacttct ttcgtatgga gaaaggaagt ataaaatgga |
| 481 | attataaaca tcaccggctc tctgtgaatg tgacagcctt gacccacagg cccaacatcc |
| 541 | tcatcccagg caccctggag tccggctgcc cccagaatct gacctgctct gtgccctggg |
| 601 | cctgtgagca ggggacaccc cctatgatct cctggatagg gacctccgtg tcccccctgg |
| 661 | acccctccac cacccgctcc tcggtgctca ccctcatccc acagccccag gaccatggca |
| 721 | ccagcctcac ctgtcaggtg accttccctg gggccagcgt gaccacgaac aagaccgtcc |
| 781 | atctcaacgt gtcctacccg cctcagaact tgaccatgac tgtcttccaa ggagacggca |
| 841 | cagtatccac agtcttggga aatggctcat ctctgtcact cccagagggc cagtctctgc |
| 901 | gcctggtctg tgcagttgat gcagttgaca gcaatccccc tgccaggctg agcctgagct |
| 961 | ggagaggcct gaccctgtgc ccctcacagc cctcaaaccc gggggtgctg gagctgcctt |
| 1021 | gggtgcacct gagggatgca gctgaattca cctgcagagc tcagaaccct ctcggctctc |
| 1081 | agcaggtcta cctgaacgtc tccctgcaga gcaaagccac atcaggagtg actcaggggg |
| 1141 | tggtcggggg agctggagcc acagccctgg tcttcctgtc cttctgcgtc atcttcgttg |
| 1201 | tagtgaggtc ctgcaggaag aaatcggcaa ggccagcagc gggcgtggga gatacgggca |
| 1261 | tagaggatgc aaacgctgtc aggggttcag cctctcagat cttgaatcat tttattggat |
| 1321 | ttcctacatt ccttggactg ggtttcgagt ttctcctgaa tctccgtgat ctttgttgcc |
| 1381 | atccagattc tgaattctat gtctatcatt tcagtcattt cagactcatt aagaacattg |
| 1441 | ctggggagat agtgtggtca cttgaaggta aaatactctg gcttttggat gtgtcagatt |
| 1501 | tctttcactg gttcttcctc atctgtgtgg gctgatgttc ctttaatctt tgaagttgct |
| 1561 | gttctttgga tagggctctt tgcttttata ttctctgatg |

SEQ ID NO: 2 Human SIGLEC9 Isoform 1 Amino Acid Sequence
(NP_001185487.1)

| | |
|---|---|
| 1 | mlllllpllw greraegqts klltmqssvt vqeglcvhvp csfsypshgw iypgpvvhgy |
| 61 | wfregantdq dapvatnnpa ravweetrdr fhllgdphtk nctlsirdar rsdagryffr |
| 121 | mekgsikwny khhrlsvnvt althrpnili pgtlesgcpq nltcsvpwac eqgtppmisw |
| 181 | igtsyspldp sttrssvltl ipqpqdhgts ltcqvtfpga svttnktvhl nvsyppqnlt |
| 241 | mtvfqgdgtv stvlgngssl slpeggslrl vcavdavdsn pparlslswr gltlcpsqps |
| 301 | npgvlelpwv hlrdaaeftc raqnplgsqq vylnvslqsk atsgvtqgvv ggagatalvf |
| 361 | lsfcvifvvv rscrkksarp aagvgdtgie danavrgsas qilnhfigfp tflglgfefi |
| 421 | lnlrdlcchp dsefyvyhfs hfrlikniag eivwslegki lwlldvsdff hwfflicvg |

SEQ ID NO: 3 Human SIGLEC9 Transcript Variant 2 cDNA Sequence
(NM_014441.2; CDS: 96-1487)

| | |
|---|---|
| 1 | tagggcctcc tctaagtctt gagcccgcag ttcctgagag aagaaccctg aggaacagac |
| 61 | gttccctcgc ggccctggca cctctaaccc cagacatgct gctgctgctg ctgcccctgc |
| 121 | tctgggggag ggagagggcg gaaggacaga caagtaaact gctgacgatg cagagttccg |
| 181 | tgacggtgca ggaaggcctg tgtgtccatg tgccctgctc cttctcctac ccctcgcatg |
| 241 | gctggattta ccctggccca gtagttcatg gctactggtt ccgggaaggg gccaatacag |
| 301 | accaggatgc tccagtggcc acaaacaacc cagctcgggc agtgtgggag gagactcggg |
| 361 | accgattcca cctccttggg gacccacata ccaagaattg caccctgagc atcagagatg |
| 421 | ccagaagaag tgatgcgggg agatacttct ttcgtatgga gaaaggaagt ataaaatgga |
| 481 | attataaaca tcaccggctc tctgtgaatg tgacagcctt gacccacagg cccaacatcc |
| 541 | tcatcccagg caccctggag tccggctgcc cccagaatct gacctgctct gtgccctggg |
| 601 | cctgtgagca ggggacaccc cctatgatct cctggatagg gacctccgtg tcccccctgg |
| 661 | acccctccac cacccgctcc tcggtgctca ccctcatccc acagccccag gaccatggca |
| 721 | ccagcctcac ctgtcaggtg accttccctg gggccagcgt gaccacgaac aagaccgtcc |
| 781 | atctcaacgt gtcptacccg cctcagaact tgaccatgac tgtcttccaa ggagacggca |
| 841 | cagtatccac agtattggga aatggctcat ctctgtcact cccagagggc cagtctctgc |
| 901 | gcctggtctg tgcagttgat gcagttgaca gcaatccccc tgccaggctg agcctgagct |
| 961 | ggagaggcct gaccctgtgc ccctcacagc cctcaaaccc gggggtgctg gagctgcctt |
| 1021 | gggtgcacct gagggatgca gctgaattca cctgcagagc tcagaaccct ctcggctctc |
| 1081 | agcaggtcta cctgaacgtc tccctgcaga gcaaagccac atcaggagtg actcaggggg |
| 1141 | tgttcggggg agctggagcc acagccctgg tcttcctgtc cttctgcgtc atcttcgttg |
| 1201 | tagtgaggtc ctgcaggaag aaatcggcaa ggccagcagc gggcgtggga gatacgggca |
| 1261 | tagaggatgc aaacgctgtc aggggttcag cctctcaggg gcccgtgact gaaccttggg |
| 1321 | cagaagacag tcccccagac cagcctcccc cagcttctgc ccgctcctca gtgggggaag |
| 1381 | gagagctcca gtatgcatcc ctcagcttcc agatggtgaa gccttgggac tcgcggggac |
| 1441 | aggaggccac tgacaccgag tactcggaga tcaagatcca cagatgagaa actgcagaga |
| 1301 | ctcaccctga ttgagggatc acagcccctc caggcaaggg agaagtcaga ggctgattct |
| 1561 | tgtagaatta acagccctca acgtgatgag ctatgataac actatgaatt atgtgcagag |
| 1621 | tgaaaagcac acaggcttta gagtcaaagt atctcaaacc tgaatccaca ctgtgccctc |
| 1681 | ccttttattt ttttaactaa aagacagaca aattcctaaa aaaaaaaaaa aaaaaaa |

SEQ ID NO: 4 Human SIGLEC9 Isoform 2 Amino Acid Sequence (NP_055236.1)

| | |
|---|---|
| 1 | mlllllpllw greraegqts klltmqssvt vqeglcvhvp csfsypshgw iypgpvvhgy |
| 61 | wfregantdq dapvatnnpa ravweetrdr fhllgdphtk nctlsirdar rsdagryffr |
| 121 | mekgsikwny khhrlsvnvt althrpnili pgtlesgcpq nltcsvpwac eqgtppmisw |
| 181 | igtsvspldp sttrssvltl ipqpqdhgts ltcqvtfpga svttnktvhl nvsyppqnlt |
| 241 | mtvfqgdgtv stvlgngssl slpegqslrl vcavdavdsn pparlslswr gltlcpsqps |
| 301 | npgvlelpwv hlrdaaeftc raqnplgsqq vylnvslqsk atsgvtqgvv ggagatalvf |
| 361 | lsfcvifvvv rscrkksarp aagvgdtgie danavrgsas qgpltepwae dsppdqpppa |
| 421 | sarssvgege lqyaslsfqm vkpwdsrgqe atdteyseik ihr |

SEQ ID NO: 5 Mouse SIGLEC9 cDNA Sequence (NM_031181.2; CDS: 30-1433)

| | |
|---|---|
| 1 | agagcctgga gagacagttt tagctggaca tgctgctgtt gctgctgctg ctgctgctct |
| 61 | gggggataaa gggtgtggag ggtcagaacc cccaagaggt tttcaccctg aatgtggaaa |
| 121 | ggaaggtggt ggtgcaggag ggcctgtgtg tccttgtgcc ctgtaacttc tcctatctca |
| 181 | agaagaggtt gactgactgg actgactcag acccagttca tggattctgg tacagggaag |
| 241 | gaaccgacag acgcaaagat tccatcgtgg ccacaaataa cccaattcgt aaagcagtga |
| 301 | aggaaacccg gaatcgattc ttcctgctcg gagacccttg gaggaatgac tgctccctga |
| 361 | acatcagaga gatcagaaag aaggatgcgg ggttatactt ctttcgcctg gagcgtggaa |
| 421 | aaacaaagta taattacatg tgggacaaga tgactctggt tgtaacagcc ctcactaaca |
| 481 | ccccccaaat tcttctcccg gagacgcttg aagctggcca tcccagcaac ctgacctgct |
| 541 | ctgtgccttg ggactgtggg tggacggcac ctcccatctt ctcctggact ggtacctctg |
| 601 | tgtcattttt gagcaccaac actacgggtt cctcagtgct aaccatcacc cctcagcctc |
| 661 | aggaccatgg caccaacctc acttgtcagg tgaccctgcc tggaactaat gtgtccacaa |
| 721 | gaatgaccat ccgtctcaac gtgtcatatg ctccaaagaa tctgactgtg accatctatc |
| 781 | aaggagctga ctcagtttcc acaatcctga agaatggctc atctcttcct atctgtgagg |
| 841 | gccagtcact gcgtctcatc tgcagcaccg agagctatcc ccctgcgaac ctaagctggt |
| 901 | cctgggataa cctgaccctg tgcccatcaa agttgtccaa gcccgggctc ctggagctgt |
| 961 | ttccagtgca tcttaagcac ggaggagtgt atacctgcca agctcaacat gccctgggct |
| 1021 | cccaacacat ttccttgagc ctgtctccac agagcagtgc aactttatct gaaatgatga |
| 1081 | tggggacctt tgtgggttca ggagtcacag ccctcctttt cctgtctgtc tgcatcctcc |
| 1141 | tcctggcagt aagatcctac aggaggaaac cagccaggcc agctgtggta gctccgcacc |
| 1201 | cagatgccct caaggtctca gtttctcaga atcccctggt tgaatcccag gcagatgaca |
| 1261 | gctctgagcc cctgccttcc atacttgagg cggccccctc ctccacagag gaagagatac |
| 1321 | attatgcgac cctcagcttt cacgagatga agcccatgaa cctgtggggg caacaggaca |
| 1381 | ctaccacgga gtactcagag ataaagtttc cacaaaggac cgcatggcca tgaccgtggc |
| 1441 | tggagaaagc atggtggccc caggaggctg gctctggaga aggaaagagt cacctaggtt |
| 1501 | gacatgtgat acacagggct tcagagccat tccttctgtg acacaggcgt tctgtgctgc |
| 1561 | ccatgcccct gtgctgccct gtccacacaa ctgctattgt gccctgggaa tcataagctt |
| 1621 | gaccttttta ctcctcttct ccccttcccc tccttccccg ccccctcttc tcctcctcct |
| 1681 | ctctcccctc tcctcccctc ttccttttgt tttttccaag acagggtttc tctgtgtagc |
| 1741 | cttggctgtc ctagaacttg ctctgcagac cagactgccc ttgaactctt ctttccaagt |
| 1801 | gctgggatta aagatgtgca ccaccaccca gcacttgact ttattgtaa |

SEQ ID NO: 6 Mouse SIGLEC9 Amino Acid Sequence (NP_112458.2)

| | |
|---|---|
| 1 | mlllllllll wgikgvegqn pqevftlnve rkvvvqeglc vlvpcnfsyl kkrltdwtds |
| 61 | dpvhgfwyre gtdrrkdsiv atnnpirkav ketrnrffll gdpwrndcsl nireirkkda |
| 121 | glyffrlerg ktkynymwdk mtlvvtaltn tpqillpetl eaghpsnltc svpwdcgwta |
| 181 | ppifswtgts vsflstnttg ssvltitpqp qdhgtnltcq vtlpgtnvst rmtirlnvsy |
| 241 | apknltvtiy qgadsvstil kngsslpise gqslrlicst dsyppanlsw swdnltlcps |
| 301 | klskpgllel fpvhlkhggv ytcqaqhalg sqhislslsp qssatlsemm mgtfvgsgvt |
| 361 | allflsvcil llavrsyrrk parpavvaph pdalkvsvsq nplvesqadd sseplpsile |
| 421 | aapssteeei hyatlsfhem kpmnlwgqqd ttteyseikf pqrtawp |

SEQ ID NO: 7 Human VSIG4 Transcript Variant 1 cDNA Sequence
(NM_007268.2; CDS: 128-1327)

| | |
|---|---|
| 1 | ggagtttgag tgagagatat agggaaggaa gggaagtaag cagtcacaga cgctggcggc |
| 61 | caccagaagt ttgagcctct ttggtagcag gaggctggaa gaaaggacag aagtagctct |
| 121 | ggctgtgatg gggatcttac tgggcctgct actcctgggg cacctaacag tggacactta |
| 181 | tggccgtccc atcctggaag tgccagagag tgtaacagga ccttggaaag gggatgtgaa |
| 241 | tcttccctgc acctatgacc ccctgcaagg ctacacccaa gtcttggtga agtggctggt |
| 301 | acaacgtggc tcagaccctg tcaccatctt tctacgtgac tcttctggag accatatcca |
| 361 | gcaggcaaag taccagggcc gcctgcatgt gagccacaag gttccaggag atgtatccct |
| 421 | ccaattgagc accgtggaga tggatgaccg gagccactac acgtgtgaag tcacctggca |
| 481 | gactcctgat ggcaaccaag tcgtgagaga taagattact gagctccgtg tccagaaact |
| 541 | ctctgtctcc aagcccacag tgacaactgg cagcggttat ggcttcacgg tgccccaggg |
| 601 | aatgaggatt agccttcaat gccaggctcg gggttctcct cccatcagtt atatttggta |
| 661 | taagcaacag actaataacc aggaacccat caaagtagca accctaagta ccttactctt |
| 721 | caagcctgcg gtgatagccg actcaggctc ctatttctgc actgccaagg gccaggttgg |
| 781 | ctctgagcag cacagcgaca ttgtgaagtt tgtggtcaaa gactcctcaa agctactcaa |
| 841 | gaccaagact gaggcaccta caaccatgac ataccccttg aaagcaacat ctacagtgaa |
| 901 | gcagtcctgg gactggacca ctgacatgga tggctacctt ggagagacca gtgctgggcc |
| 961 | aggaaagagc ctgcctgtct ttgccatcat cctcatcatc tccttgtgct gtatggtggt |
| 1021 | ttttaccatg gcctatatca tgctctgtcg gaagacatcc caacaagagc atgtctacga |
| 1081 | agdagccagg gcacatgcca gagaggccaa cgactctgga gaaaccatga gggtggccat |
| 1141 | cttcgcaagt ggctgctcca gtgatgagcc aacttcccag aatctgggca acaactactc |
| 1201 | tgatgagccc tgcataggac aggagtacca gatcatcgcc cagatcaatg gcaactacgc |
| 1261 | ccgcctgctg gacacagttc ctctggatta tgagtttctg gccactgagg gcaaaagtgt |
| 1321 | ctgttaaaaa tgccccatta ggccaggatc tgctgacata attgcctagt cagtccttgc |
| 1381 | cttctgcatg gccttcttcc ctgctacctc tcttcctgga tagcccaaag tgtccgccta |
| 1441 | ccaacactgg agccgctggg agtcactggc tttgccctgg aatttgccag atgcatctca |
| 1501 | agtaagccag ctgctggatt tggctctggg cccttctagt atctctgccg ggggcttctg |
| 1561 | gtactcctct ctaaatacca gaggccagat gcccatagca ctaggacttg gtcatcatgc |
| 1621 | ctacagacac tattcaactt tggcatcttg ccaccagaag acccgaggga ggctcagctc |
| 1681 | tgccagctca gaggaccagc tatatccagg atcatttctc tttcttcagg gccagacagc |
| 1741 | ttttaattga aattgttatt tcacaggcca gggttcagtt ctgctcctcc actataagtc |
| 1801 | taatgttctg actctctcct ggtgctcaat aaatatctaa tcataacagc aaaaaaaaaa |
| 1861 | aaaaaaaaa |

SEQ ID NO: 8 Human VSIG4 Isoform 1 Amino Acid Sequence (NP_909199.1)

| | |
|---|---|
| 1 | mgillgllll ghltvdtygr pilevpesvt gpwkgdvnlp ctydplqgyt qvlvkwlvqr |
| 61 | gsdpvtiflr dssgdhiqqa kyqgrlhvsh kvpqdvslql stlemddrsh ytcevtwqtp |
| 121 | dgnqvvrdki telrvqklsv skptvttgsg ygftvpqgmr islqcqargs ppisyiwykq |
| 181 | qtnnqepikv atlstllfkp aviadsgsyf ctakgqvgse qhsdivkfvv kdsskllktk |
| 241 | teapttmtyp lkatstvkqs wdwttdmdgy lgetsagpgk slpvfaiill islccmvvft |
| 301 | mayimlcrkt sqqehvyeaa rahareands getmrvaifa sgcssdepts qnlgnnysde |
| 361 | pcigqeyqii aqingnyarl ldtvpldyef lategksvc |

SEQ ID NO: 9 Human VSIG4 Transcript Variant 2 cDNA Sequence
(NM_001100431.1; CDS: 128-1045)

| | |
|---|---|
| 1 | ggagtttgag tgagagatat agggaaggaa gggaagtaag cagtcacaga cgctggcggc |
| 61 | caccagaagt ttgagcctct ttggtagcag gaggctggaa gaaaggacag aagtagctct |
| 121 | ggctgtgatg gggatcttac tgggcctgct actcctgggg cacctaacag tggacactta |
| 181 | tggccgtccc atcctggaag tgccagagag tgtaacagga ccttggaaag gggatgtgaa |
| 241 | tcttccctgc acctatgacc ccctgcaagg ctacacccaa gtcttggtga agtggctggt |
| 301 | acaacgtggc tcagaccctg tcaccatctt tctacgtgac tcttctggag accatatcca |
| 361 | gcaggcaaag taccagggcc gcctgcatgt gagccacaag gttccaggag atgtatccct |
| 421 | ccaattgagc accctggaga tggatgaccg gagccactac acgtgtgaag tcacctggca |
| 481 | gactcctgat ggcaaccaag tcgtgagaga taagattact gagctccgtg tccagaaaca |
| 541 | ctcctcaaag ctactcaaga ccaagactga ggcacctaca accatgacat accccttgaa |
| 601 | agcaacatct acagtgaagc agtcctggga ctggaccact gacatggatg gctaccttgg |
| 661 | agagaccagt gctgggccag gaaagagcct gcctgtcttt gccatcatcc tcatcatctc |
| 721 | cttgtgctgt atggtggttt ttaccatggc ctatatcatg ctctgtcgga agacatccca |
| 781 | acaagagcat gtctacgaag cagccagggc acatgccaga gaggccaacg actctggaga |
| 841 | aaccatgagg gtggccatct tcgcaagtgg ctgctccagt gatgagccaa cttcccagaa |
| 901 | tctagggcaa aactactctg atgagccctg cataggacag gagtaccaga tcatcgccca |
| 961 | gatcaatggc aactacgccc gcctgctgga cacagttcct ctggattatg agtttctggc |
| 1021 | cactgagggc aaaagtgtct gttaaaaatg ccccattagg ccaggatctg ctgacataat |
| 1081 | tgcctagtca gtccttgcct tctgcatggc cttcttccct gctacctctc ttcctggata |
| 1141 | gcccaaagtg tccgcctacc aacactggag ccgctgggag tcactggctt tgccctggaa |
| 1201 | tttgccagat gcatctcaag taagccagct gctggatttg gctctgggcc cttctagtat |
| 1261 | ctctgccggg ggcttctggt actcctctct aaataccaga gggaagatgc ccatagcact |
| 1321 | aggacttggt catcatgcct acagacacta ttcaactttg gcatcttgcc accagaagac |
| 1381 | ccgagggagg ctcagctctg ccagctcaga ggaccagcta tatccaggat catttctctt |
| 1441 | tcttcagggc cagacagctt ttaattgaaa ttgttatttc acaggccagg gttcagttct |
| 1501 | gctcctccac tataagtcta atgttctgac tctctcctgg tgctcaataa atatctaatc |
| 1561 | ataacagcaa aaaaaaaaaa aaaaaa |

SEQ ID NO: 10 Human VSIG4 Isoform 2 Amino Acid Sequence (NP_001093901.1)

| | |
|---|---|
| 1 | mgillgllll ghltvdtygr pilevpesvt gpwkgdvnlp ctydplqgvt qvlvkwlvqr |
| 61 | gsdpvtiflr dssgdhiqqa kyqgrlhvsh kvpgdvslql stlemddish ytcevtwqtp |
| 121 | dgnqvvrdki telrvqkhss kllktkteap ttmtyplkat stvkqswdwt tdmdgylget |
| 181 | sagpgkslpv faiiliislc cmvvftmayi mlcrktsqqe hvyeaaraha reandsgetm |
| 241 | rvaifasgcs sdeptsqnlg nnysdepcig qeyqiiaqin gnyarlldtv pldyeflate |
| 301 | gksvc |

SEQ ID NO: 11 Human VSIG4 Transcript Variant 3 cDNA Sequence
(NM_001184831.1; CDS: 128-811)

| | |
|---|---|
| 1 | ggagtttgag tgagagatat agggaaggaa gggaagtaag cagtcacaga cgctggcggc |
| 61 | caccagaagt ttgagcctct ttggtagcag gaggctggaa gaaaggacag aagtagctct |
| 121 | ggctgtgatg gggatcttac tgggcctgct actcctgggg cacctaacag tggacactta |
| 181 | tggccgtccc atcctggaag tgccagagag tgtaacagga ccttggaaag gggatgtgaa |
| 241 | tcttccctgc acctatgacc ccctgcaagg ctacacccaa gtcttggtga agtggctggt |
| 301 | acaacgtggc tcagaccctg tcaccatctt tctacgtgac tcttctggag accatatcca |
| 361 | gcaggcaaag taccagggcc gcctgcatgt gagccacaag gttccaggag atgtatccct |
| 421 | ccaattgagc accctggaga tggatgaccg gagccactac acgtgtgaag tcacctggca |
| 481 | gactcctgat ggcaaccaag tcgtgagaga taagattact gagctccgtg tccagaaaca |
| 541 | ctcctcaaag ctactcaaga ccaagactga ggcacctaca accatgacat accccttgaa |
| 601 | agcaacatct acagtgaagc agtcctggga ctggaPcact gacatggatg gctaccttgg |
| 661 | accgaccagt gctgggccag gaaagagcct gcctgtcttt gccatcatcc tcatcatctc |
| 721 | cttgtgctgt atggtggttt ttaccatggc ctatatcatg ctctgtcgga agacatccca |
| 781 | acaagagcat gtctacgaag cagccaggta agaaagtctc tcctcttcca tttttgaccc |
| 841 | cgtccctgcc ctcaattttg attactggca ggaaatgtgg aggaaggggg gtgtggcaca |
| 901 | gacccaatcc taaggccgga ggccttcagg gtcaggacat agctgccttc cctctctcag |
| 961 | gcaccttctg aggttgtttt ggccctctga acacaaagga taatttagat ccatctgcct |
| 1021 | tctgcttcca gaatccctgg gtggtaggat cctgataatt aattggcaag aattgaggca |
| 1081 | gaagggtggg aaaccaggac cacagcccca agtcccttct tatgggtggt gggctcttgg |
| 1141 | gccatagggc acatgccaga gaggccaacg actctggaga aaccatgagg gtggccatct |
| 1201 | tcgcaagtgg ctgctccagt gatgagccaa cttcccagaa tctgggcaac aactactctg |
| 1261 | atgagccctg cataggacag gagtaccaga tcatcgccca gatcaatggc aactacgccc |
| 1321 | gcctgctgga cacagttcct ctggattatg agtttctggc cactgagggc aaaagtgtct |
| 1381 | gttaaaaatg ccccattagg ccaggatctg ctgacataat tgcctagtca gtccttgcct |
| 1441 | tctgcatggc cttcttccct gctacctctc ttcctggata gcccaaagtg tccgcctacc |
| 1501 | aacactggag ccgctgggag tcactggctt tgccctggaa tttgccagat gcatctcaag |
| 1561 | taagccagct gctggatttg gctctgggcc cttctagtat ctctgccggg ggcttctggt |
| 1621 | actcctctct aaataccaga gggaagatgc ccatagcact aggacttggt catcatgcct |
| 1681 | acagacacta ttcaactttg gcatcttgcc accagaagac ccgagggagg ctcagctctg |
| 1741 | ccagctcaga ggaccagcta tatccaggat catttctctt tcttcagggc cagacagctt |
| 1801 | ttaattgaaa ttgttatttc acaggccagg gttcagttct gctcctccac tataagtcta |
| 1861 | atgttctgac tctctcctgg tgctcaataa atatctaatc ataacagcaa aaaaaaaaaa |
| 1921 | aaaaaaa |

SEQ ID NO: 12 Human VSIG4 Isoform 3 Amino Acid Sequence (NP_001171760.1)

| | |
|---|---|
| 1 | mgillgllll ghltvdtygr pilevpesvt gpwkgdynlp ctydplqgyt qvlvkwlvqr |
| 61 | gsdpvtiflr dssgdhiqqa kyqgrlhvsh kvpgdyslql stlemddrsh ytcevtwqtp |
| 121 | dgnqvvrdki telrvqkhss kllktkteap ttmtyplkat stvkqswdwt tdmdgylget |
| 181 | sagpgkslpv faiiliislc cmvvftmayi mlcrktsqqe hvyeaar |

SEQ ID NO: 13 Human VSIG4 Transcript Variant 4 cDNA Sequence
(NM_001184830.1; CDS: 128-1093)

| | |
|---|---|
| 1 | ggagtttgag tgagagatat agggaaggaa gggaagtaag cagtcacaga cgctggcggc |
| 61 | caccagaagt ttgagcctct ttggtagcag gaggctggaa gaaaggacag aagtagctct |
| 121 | ggctgtgatg gggatcttac tgggcctgct actcctgggg cacctaacag tggacactta |
| 181 | tggccgtccc atcctggaag tgccagagag tgtaacagga ccttggaaag gggatgtgaa |
| 241 | tcttccctgc acctatgacc ccctgcaagg ctacacccaa gtcttggtga agtggctggt |
| 301 | acaacgtggc tcagaccctg tcaccatctt tctacgtgac tcttctggag accatatcca |
| 361 | gcaggcaaag taccagggcc gcctgcatgt gagccacaag gttccaggag atgtatccct |
| 421 | ccaattgagc accctggaga tggatgaccg gagccactac acgtgtgaag tcacctggca |
| 481 | gactcctgat ggcaaccaag tcgtgagaga taagattact gagctccgtg tccagaaact |
| 541 | ctctgtctcc aagcccacag tgacaactgg cagcggttat ggcttcacgg tgccccaggg |
| 601 | aatgaggatt agccttcaat gccaggctcg gggttctcct cccatcagtt atatttggta |
| 661 | taagcaacag actaataacc aggaacccat caaagtagca accctaagta ccttactctt |
| 721 | caagcctgcg gtgatagccg actcaggctc ctatttctgc actgccaagg gccaggttgg |
| 781 | ctctgagcag cacagcgaca ttgtgaagtt tgtggtcaaa gactcctcaa agctactcaa |
| 841 | gaccaagact gaggcaccta caaccatgac ataccccttg aaagcaacat ctacagtgaa |
| 901 | gcagtcctgg gactggacca ctgacatgga tggctacctt ggagagacca gtgctgggcc |
| 961 | aggaaagagc ctgcctgtct ttgccatcat cctcatcatc tccttgtgct gtatggtggt |
| 1021 | ttttaccatg gcctatatca tgctctgtcg gaagacatcc caacaagagc atgtctacga |
| 1081 | agcagccagg taagaaagtc tctcctcttc catttttgac cccgtccctg ccctcaattt |
| 1141 | tgattactgg caggaaatgt ggaggaaggg gggtgtggca cagacccaat cctaaggccg |
| 1201 | gaggccttca gggtcaggac atagctgcct tccctctctc aggcaccttc tgaggttgtt |
| 1261 | ttggccctct gaacacaaag gataatttag atccatctgc cttctgcttc cagaatccct |
| 1321 | gggtggtagg atcctgataa ttaattggca agaattgagg cagaagggtg ggaaaccagg |
| 1381 | accacagccc caagtccctt cttatgggtg gtgggctctt gggccatagg gcacatgcca |
| 1441 | gagaggccaa cgactctgga gaaaccatga gggtggccat cttcgcaagt ggctgctcca |
| 1501 | gtgatgagcc aacttcccag aatctgggca acaactactc tgatgagccc tgcataggac |
| 1561 | aggagtacca gatcatcgcc cagatcaatg gcaactacgc ccgcctgctg gacacagttc |
| 1621 | ctctggatta tgagtttctg gccactgagg gcaaaagtgt ctgttaaaaa tgccccatta |
| 1681 | ggccaggatc tgctgacata attgcctagt cagtccttgc cttctgcatg gccttcttcc |
| 1741 | ctgctacctc tcttcctgga tagcccaaag tgtccgccta ccaacactgg agccgctggg |
| 1801 | agtcactggc tttgccctgg aatttgccag atgcatctca agtaagccag ctgctggatt |
| 1861 | tggctctggg cccttctagt atctctgccg ggggcttctg gtactcctct ctaaatacca |
| 1921 | gagggaagat gcccatagca ctaggacttg gtcatcatgc ctacagacac tattcaactt |
| 1981 | tggcatcttg ccaccagaag acccgaggga ggctcagctc tgccagctca gaggaccagc |
| 2041 | tatatccagg atcatttctc tttcttcagg gccagacagc ttttaattga aattgttatt |
| 2101 | tcacaggcca gggttcagtt ctgctcctcc actataagtc taatgttctg actctctcct |
| 2161 | ggtgctcaat aaatatctaa tcataacagc aaaaaaaaaa aaaaaaaaa |

SEQ ID NO: 14 Human VSIG4 Isoform 4 Amino Acid Sequence (NP_001171759.1)

| | |
|---|---|
| 1 | mgillgllll ghltvdtygr pilevpesvt gpwkgdynlp ctydplqgyt gvlvkwlvgr |
| 61 | gsdpvtiflr dssgdhiqqa kyqgrlhvsh kvpgdvslql stlemddrsh ytcevtwqtp |
| 121 | dgnqvvrdki telrvqklsv skptvttgsg ygftypqgmr islqcqargs ppisyiwykq |
| 181 | gtnnqepikv atlstllfkp aviadsgsyf ctakgqvgse qhsdivkfvv kdsskllktk |
| 241 | teapttmtyp lkatstvkqs wdwttdmdgy lgetsagpgk slpvfaiili islccmvvft |
| 301 | mayimlcrkt sqqehvyeaa a |

SEQ ID NO: 15 Human VSIG4 Transcript Variant 5 cDNA Sequence
(NM_001257403.1; CDS: 128-1171)

| | |
|---|---|
| 1 | ggagtttgag tgagagatat agggaaggaa gggaagtaag cagtcacaga cgctggcggc |
| 61 | caccagaagt ttgagcctct ttggtagcag gaggctggaa gaaaggacag aagtagctct |
| 121 | ggctgtgatg gggatcttac tgggcctgct actcctgggg cacctaacag tggacactta |
| 181 | tggccgtccc atcctggaag tgccagagag tgtaacagga ccttggaaag gggatgtgaa |
| 241 | tcttccgtgc acctatgacc ccctgcaagg ctacacccaa gtcttggtga agtggctggt |
| 301 | acaacgtggc tcagaccctg tcaccatctt tctacgtgac tcttctggag accatatcca |
| 361 | gcaggcaaag taccagggcc gcctgcatgt gagccacaag gttccaggag atgtatccct |
| 421 | ccaattgagc accctggaga tggatgaccg gagccactac acgtgtgaag tcacctggca |
| 481 | gactcctgat ggcaaccaag tcgtgagaga taagattact gagctccgtg tccagaaact |
| 541 | ctctgtctcc aagcccacag tgacaactgg cagcggttat ggcttcacgg tgccccaggg |
| 601 | aatgaggatt agccttcaat gccaggctcg gggttctcct cccatcagtt atatttggta |
| 661 | taagcaacag actaataacc aggaacccat caaagtagca accctaagta ccttactctt |
| 721 | caagcctgcg gtgatagccg actcaggctc ctatttctgc actgccaagg gccaggttgg |
| 781 | ctctgagcag cacagcgaca ttgtgaagtt tgtggtcaaa gactcctcaa agctactcaa |
| 841 | gaccaagact gaggcaccta caaccatgac ataccccttg aaagcaacat ctacagtgaa |
| 901 | gcagtcctgg gactggacca ctgacatgga tggctacctt ggagagacca gtgctgggcc |
| 961 | aggaaagagc ctgcctgtct ttgccatcat cctcatcatc tccttgtgct gtatggtggt |
| 1021 | ttttaccatg gcctatatca tgctctgtcg gaagacatcc caacaagagc atgtctacga |
| 1081 | agcagccagc ccaaagtgtc cgcctaccaa cactggagcc gctgggagtc actggctttg |
| 1141 | ccctggaatt tgccagatgc atctcaagta agccagctgc tggatttggc tctgggccct |
| 1201 | tctagtatct ctgccggggg cttctggtac tcctctctaa ataccagagg gaagatgccc |
| 1261 | atagcactag gacttggtca tcatgcctac agacactatt caactttggc atcttgccac |
| 1321 | cagaagaccc gagggaggct cagctctgcc agctcagagg accagctata tccaggatca |
| 1381 | tttctctttc ttcagggcca gacagctttt aattgaaatt gttatttcac aggccagggt |
| 1441 | tcagttctgc tcctccacta taagtctaat gttctgactc tctcctggtg ctcdataaat |
| 1501 | atctaatcat aacagcaaaa aaaaaaaaaa aaaaa |

SEQ ID NO: 16 Human VSIG4 Isoform 5 Amino Acid Sequence (NP_001244332.1)

| | |
|---|---|
| 1 | mgillgllll ghltvdtygr pilevpesvt gpwkgdvnlp ctydplqgyt qvlvkwlvqr |
| 61 | gsdpvtiflr dssgdhiqqa kyqgrlhvsh kvpgdvslql stlemddrsh ytcevtwqtp |
| 121 | dgnqvvrdki telrvqklsv skptvttgsg vgftvpqgmr islqcqargs ppisyiwykq |
| 181 | qtnnqepikv atlstllfkp aviadsgsyf ctakgqvgse qhsdivkfvv kdsskllktk |
| 241 | teapttmtyp lkatstvkqs wdwttdmdgy lgetsagpgk slpvfaiili islccmvvft |
| 301 | mayimlcrkt sqqehvyeaa spkcpptntg aagshwlcpg icqmhlk |

SEQ ID NO: 17 Mouse VSIG4 cDNA Sequence (NM_177789.4; CDS: 71-913)

| | |
|---|---|
| 1 | agctaccagc acttccaggt tcttcagcag caagaggatg gaaggatgaa tagaagtagc |
| 61 | ttcaaatagg atggagatct catcaggctt gctgttcctg ggccacctaa tagtgctcac |
| 121 | ctatggccac cccaccctaa aaacacctga gagtgtgaca gggacctgga aaggagatgt |
| 181 | gaagattcag tgcatctatg atcccctgag aggctacagg caagttttgg tgaaatggct |
| 241 | ggtaagacac ggctctgact ccgtcaccat cttcctacgt gactccactg gagaccatat |
| 301 | ccagcaggca aagtacagag gccgcctgaa agtgagccac aaagttccag gagatgtgtc |
| 361 | cctccaaata aataccctgc agatggatga caggaatcac tatacatgtg aggtcacctg |
| 421 | gcagactcct gatggaaacc aagtaataag agataagatc attgagctcc gtgttcggaa |
| 481 | atataatcca cctagaatca atactgaagc acctacaacc ctgcactcct ctttggaagc |
| 541 | aacaactata atgagttcaa cctctgactt gaccactaat gggactggaa aacttgagga |
| 601 | gaccattgct ggttcaggga ggaacctgcc aatctttgcc ataatcttca tcatctccct |
| 661 | ttgctgcata gtagctgtca ccatacctta tatcttgttc cgctgcagga cattccaaca |
| 721 | agagtatgtc tatggagtga gcagggtgtt tgccaggaag acaagcaact ctgaagaaac |
| 781 | cacaagggtg actaccatcg caactgatga accagattcc caggctctga ttagtgacta |
| 841 | ctctgatgat ccttgcctca gccaggagta ccaaataacc atcagatcaa caatgtctat |
| 901 | tcctgcctgc tgaacacagt ttccagaaac taagaagttc ttgctactga agaaaataac |
| 961 | atctgctaaa atgcccctac taagtcaagg tctactggcg taattacctg ttacttattt |
| 1021 | actacttgcc ttcaacatag ctttctccct ggcttccttt cttcttagac aacctaaagt |
| 1081 | atctatctag tctgccaatt ctggggccat tgagaaatcc tgggtttggc taagaatata |
| 1141 | ctacatgcac ctcaagaaat ctagcttctg ggcttcaccc agaacaattt tcttcctagg |
| 1201 | gccttcacaa ctcttctcca aacagcagag aaattccata gcagtagagg ttctttatca |
| 1261 | tgcctccaga cagcgtgagt ctcagtccta caaactcaga caagcacatg ggtctaggat |
| 1321 | tactcctctt tctctagggc cagatgactt ttaattgata ttactattgc tacattatga |
| 1381 | atctaatgca catgtattct tttgttgtta ataaatgttt aatcatgaca tc |

SEQ ID NO: 18 Mouse VSIG4 Amino Acid Sequence (NP_808457.1)

| | |
|---|---|
| 1 | meissgllfl ghlivltygh ptlktpesvt gtwkgdvkiq ciydplrgyr qvlvkwlvrh |
| 61 | gsdsvtiflr dstgdhiqqa kyrgrlkvsh kvpqdvslqi ntlqmddrnh ytcevtwqtp |
| 121 | dgnqvirdki ielrvrkynp printeaptt lhssleatti msstsdlttn gtgkleetia |
| 181 | gsgrnlpifa iifiislcci vavtipyilf rcrtfqqeyv ygvsrvfark tsnseettrv |
| 241 | ttiatdepds qalisdysdd pclsqeyqit irstmsipac |

SEQ ID NO: 19 Human CD74 Transcript Variant 1 cDNA Sequence
(NM_001025159.2; CDS: 188-1078)

| | |
|---|---|
| 1 | ctgcctgggg agcccccccg ccccacatcc tgcccggcaa aaggcagctt caccaaagtg |
| 61 | gggtatttcc agcctttgta gctttcactt ccacatctac caagtgggcg gagtggcctt |
| 121 | ctgtggacga atcagattcc tctccagcac cgactttaag aggcgagccg gggggtcagg |
| 181 | gtcccagatg cacaggagga gaaagcagga ctgtcgggaa gatcagaagc cagtcatgga |
| 241 | tgaccagcgc gaccttatct ccaacaatga gcaactgccc atgctgggcc ggcgccctgg |
| 301 | ggccccggag agcaagtgca gccggggagc cctgtacaca ggcttttcca tcctggtgac |
| 361 | tctgctcctc gctggccagg ccaccaccgc ctacttcctg taccagcagc agggccggct |
| 421 | ggacaaactg acagtcacct cccagaacct ggagctggag aacctgcgca tgaagcttcc |
| 481 | caagcctccc aagcctgtga gcaagatgcg catggccacc ccgctgctga tgcaggcgct |
| 541 | gcccatggga gccctgcccc aggggcccat gcagaatgcc accaagtatg gcaacatgac |
| 601 | agaggaccat gtgatgcacc tgctccagaa tgctgacccc ctgaaggtgt acccgccact |
| 661 | gaaggggagc ttcccggaga acctgagaca ccttaagaac accatggaga ccatagactg |
| 721 | gaaggtcttt gagagctgga tgcaccattg gctcctgttt gaaatgagca ggcactcctt |
| 781 | ggagcaaaag cccactgacg ctccaccgaa agtactgacc aagtgccagg aagaggtcag |
| 841 | ccacatccct gctgtccacc cgggttcatt caggcccaag tgcgacgaga acggcaacta |
| 901 | tctgccactc cagtgctatg ggagcatcgg ctactgctgg tgtgtcttcc ccaacggcac |
| 961 | ggaggtcccc aacaccagaa gccgcgggga ccataactgc agtgagtcac tggaactgga |
| 1021 | ggacccgtct tctgggctgg gtgtgaccaa gcaggatctg ggcccagtcc ccatgtgaga |
| 1081 | gcagcagagg cggtcttcaa catcctgcca gccccacaca gctacagctt tcttgctcpc |
| 1141 | ttcagccccc agcccctccc ccatctccca ccctgtacct catcccatga gaccctggtg |
| 1201 | cctggctctt tcgtcaccct tggacaagac aaaccaagtc ggaacagcag ataacaatgc |
| 1261 | agcaaggccc tgctgcccaa tctccatctg tcaacagggg cgtgaggtcc caggaagtgg |
| 1321 | ccaaaagcta gacagatccc cgttcctgac atcacagcag cctccaacac aaggctccaa |
| 1381 | gacctaggct catggacgag atgggaaggc acagggagaa gggataaccc tacacccaga |
| 1441 | ccccaggctg gacatgctga ctgtcctctc ccctccagcc tttggccttg gcttttctag |
| 1501 | cctatttacc tgcaggctga gccactctct tccctttccc cagcatcact ccccaaggaa |
| 1561 | gagccaatgt tttccaccca taatcctttc tgccgacccc tagttccctc tgctcagcca |
| 1621 | agcttgttat cagctttcag ggccatggtt cacattagaa taaaaggtag taattagaac |
| 1681 | aaaaaaaaaa aaaaaaaa |

SEQ ID NO: 20 Human CD74 Isoform A Amino Acid Sequence (NP_001020330.1)

| | |
|---|---|
| 1 | mhrrrsrscr edqkpvmddq rdlisnneql pmlgrrpgap eskcsrgaly tgfsilvtll |
| 61 | lagqattayf lyqqqgrldk ltvtsqnlql enlrmklpkp pkpvskmrma tpllmqalpm |
| 121 | galpqgpmqn atkygnmted hvmhllqnad plkvypplkg sfpenlrhlk ntmetidwkv |
| 181 | feswmhhwll femsrhsleq kptdappkvl tkcqeevshi pavhpgsfrp kcdengnylp |
| 241 | lqcygsigyc wcvfpngtev pntrsrghhn csesleledp ssglgvtkqd lgpvpm |

SEQ ID NO: 21 Human CD74 Transcript Variant 2 cDNA Sequence (NM_004355.3;
CDS: 188-886)

| | |
|---|---|
| 1 | ctgcctgggg agccccggcg ccccacatcc tgccccgcaa aaggcagctt caccaaagtg |
| 61 | gggtatttcc agcctttgta gctttcactt ccacatctac caagtgggcg gagtggcctt |
| 121 | ctgtggacga atcagattcc tctccagcac cgactttaag aggcgagccg gggggtcagg |
| 181 | gtcccagatg cacaggagga gaagcaggag ctgtcgggaa gatcagaagc cagtcatgga |
| 241 | tgaccagcgc gaccttatct ccaacaatga gcaactgccc atgctgggcc ggcgccctgg |
| 301 | ggccccggag agcaagtgca gccgcggagc cctgtacaca ggcttttcca tcctggtgac |
| 361 | tctgctcctc gctggccagg ccaccaccgc ctacttcctg taccaggagc agggccggct |
| 421 | ggacaaactg acagtcacct cccagaacct ggagctggag aacctgcgca tgaagcttcc |
| 481 | caagcctccc aagcctgtga gcaagatgcg catggccacc ccgctgctga tgcaggcgct |
| 541 | gcccatggga gccctgcccc aggggcccat gcagaatgcc accaagtatg gcaacatgac |
| 601 | agaggaccat gtgatgcacc tgctccagaa tgctgacccc ctggaggtgt acccgccact |
| 661 | gaaggggagc ttcccggaga acctgagaca ccttaagaac accatggaga ccatagactg |
| 721 | gaaggtcttt gagagctgga tgcaccattg gctcctgttt gaaatgagca ggcactcctt |
| 781 | ggagcaaaag cccactgacg ctccaccgaa agagtcactg gaactggagg acccgtcttc |
| 841 | tgggctgggt gtgaccaagc aggatctggg cccagtcccc atgtgagagc agcagaggcg |
| 901 | gtcttcaaca tcctgccagc cccacacagc tacagctttc ttgctccctt cagcccccag |
| 961 | cccctccccc atctcccacc ctgtacctca tcccatgaga ccctggtgcc tggctctttc |
| 1021 | gtcacccttg gacaagacaa accaagtcgg aacagcagat aacaatgcag caaggccctg |
| 1081 | ctgcccaatc tccatctgtc aacaggggcg tgaggtccca ggaagtggcc aaaagctaga |
| 1141 | cagatccccg ttcctgacat cacagcagcc tccaacacaa ggctccaaga cctaggctca |
| 1201 | tggacgagat gggaaggcac agggagaagg gataacccta cacccagacc ccaggctgga |
| 1261 | catgctgact gtcctctccc ctccagcctt tggccttggc ttttctagcc tatttacctg |
| 1321 | caggctgagc cactctcttc cctttcccca gcatcactcc ccaaggaaga gccaatgttt |
| 1381 | tccacccata atcctttctg ccgaccccta gttccctctg ctcaggcaag cttgttatca |
| 1441 | gctttcaggg ccatggttca cattagaata aaaggtagta attagaacaa aaaaaaaaaa |
| 1501 | aaaaaa |

SEQ ID NO: 22 Human CD74 Isoform B Amino Acid Sequence (NP_004346.1)

| | |
|---|---|
| 1 | mhrrrsrscr edqkpvmddq rdlisnneql pmlgrrpgap eskcsrgaly tgfsilvtll |
| 61 | lagqattayf lyqqqgrldk ltvtsqnlql enarmklpkp pkpvskmrma tpllmqalpm |
| 121 | galpqgpmqn atkygnmted hvmhllqnad plkvypplkg sfpenlrhlk ntmetidwkv |
| 181 | feswmhhwll femsrhsleq kptdappkes leledpssgl gvtkqdlgpv pm |

SEQ ID NO: 23 Human CD74 Transcript Variant 3 cDNA Sequence
(NM_001025158.2; CDS: 188-670)

| | |
|---|---|
| 1 | ctgcctgggg agcccccccg ccccacatcc tgccccgcaa aaggcagctt caccaaagtg |
| 61 | gggtatttcc agcctttgta gctttcactt ccacatctac caagtgggcg gagtggcctt |
| 121 | ctgtggacga atcagattcc tctccagcac cgactttaag aggcgagccg gggggtcagg |
| 181 | gtcccagatg cacaggagga gaagcaggag ctgtcgggaa gatcagaagc cagtcatgga |
| 241 | tgaccagcgc gaccttatct ccaacaatga gcaactgccc atgctgggcc ggcgccctgg |
| 301 | ggccccggag agcaagtgca gccgcggagc cctgtacaca ggcttttcca tcctggtgac |
| 361 | tctgctcctc gctggccagg ccaccaccgc ctacttcctg taccagcagc agggccggct |
| 421 | ggacaaactg acagtcacct cccagaacct gcagctggag aacctgcgca tgaagcttcc |
| 481 | caagcctccc aagcctgtga gcaagatgcg catggccacc ccgctgctga tgcaggcgct |
| 541 | gcccatggga gccctgcccc aggggcccat gcagaatgcc accaagtatg gcaacatgac |
| 601 | agaggaccat gtgatgcacc tgctccagag tcactggaac tggaggaccc gtcttctggg |
| 661 | ctgggtgtga ccaagcagga tctgggccca gtccccatgt gagagcagca gaggcggtct |
| 721 | tcaacatcct gccagcccca cacagctaca gctttcttgc tcccttcagc ccccagcccc |
| 781 | tcccccatct cccaccctgt acctcatccc atgagaccct ggtgcctggc tctttcgtca |
| 841 | cccttggaca agacaaacca agtcggaaca gcagataaca atgcagcaag gccctgctgc |
| 901 | ccaatctcca tctgtcaaca ggggcgtgag gtcccaggaa gtggccaaaa gctagacaga |
| 961 | tccccgttcc tgacatcaca gcagcctcca acacaaggct ccaagaccta ggctcatggc |
| 1021 | cgagatggga aggcacaggg agaagggata accctacacc cagaccccag gctggacatg |
| 1081 | ctgactgtcc tctcccctcc agcctttggc cttggctttt ctagcctatt tacctgcagg |
| 1141 | ctgagccact ctcttccctt tccccagcat cactccccaa ggaagagcca atgttttcca |
| 1201 | cccataatcc tttctgccga cccctagttc cctctgctca gccaagcttg ttatcagctt |
| 1261 | tcagggccat ggttcacatt agaataaaag gtagtaatta gaacaaaaaa aaaaaaaaaa |
| 1321 | aa |

SEQ ID NO: 24 Human CD74 Isoform C Amino Acid Sequence (NP_001020329.1)

| | |
|---|---|
| 1 | mhmrrrsrcr edqkpvmddq rdlisnneql pmlgrrpgap eskcsrgaly tgfsilvtll |
| 61 | lagqattayf lyqqqgrldk ltvtsqnlql enlrmklpkp pkpvskmrma tpllmqalpm |
| 121 | galpqgpmqn atkygnmted hvmhllqshw nwrtrllgwv |

SEQ ID NO: 25 Mouse CD74 Transcript Variant 1 cDNA Sequence
(NM_001042605.1; CDS: 86-925)

| | |
|---|---|
| 1 | agacacacag cagcagcagc agcagcagca gcagcaacag cagcagcagc agcagcgcct |
| 61 | gtgggaaaaa ctagaggcta gagccatgga tgaccaacgc gacctcatct ctaaccatga |
| 121 | acagttgccc atactgggca accgccctag agagccagaa aggtgcagcc gtggagctct |
| 181 | gtacaccggt gtctctgtcc tggtggctct gctcttggct gggcaggcca ccactgctta |
| 241 | cttcctgtac cagcaacagg gccgcctaga caagctgacc atcacctccc agaacctgca |
| 301 | actggagagc cttcgcatga agcttccgaa atctgccaaa cctgtgagcc agatgcggat |
| 361 | ggctactccc ttgctgatgc gtccaatgtc catggataac atgctccttg ggcctgtgaa |
| 421 | gaacgttacc aagtacggca acatgaccca ggaccatgtg atgcatctgc tcacgaggtc |
| 481 | tggacccctg gagtacccgc agctgaaggg gaccttccca gagaatctga agcatcttaa |
| 541 | gaactccatg gatggcgtga actggaagat cttcgagagc tggatgaagc agtggctctt |
| 601 | gtttgagatg agcaagaact ccctggagga gaagaagccc accgaggctc cacctaaagt |
| 661 | actgaccaag tgccaggaag aagtcagcca catccctgcc gtctacccgg gtgcgttccg |
| 721 | tcccaagtgc gacgagaacg gtaactattt gccactccag tgccacggga gcactggcta |
| 781 | ctgctggtgt gtgttcccca acggcactga ggttcctcac accaagagcc gcgggcgcca |
| 841 | taactgcagt gagccactgg acatggaaga cctatcttct ggcctgggag tgaccaggca |
| 901 | ggaactgggt caagtcaccc tgtgaagaca gaggccagct ctgcacagca gcagcgcccc |
| 961 | ctgctctcct gtgcctcagc ccttcttatg ttccctgatg tcacacccca cttcccgtct |
| 1021 | ccctgcaccc tggggcttga gactggtgtc tgtttcatcg tcccaggaca cggcaaatga |
| 1081 | agtcagaaca gaaggaggac gctggagggc cttgctggct accgctatct aaagggaacc |
| 1141 | cccatttctg acccattagt agtcttgaat gtggggctct gagataaagg cccgcagaca |
| 1201 | gggacaaggg atgccctacc cttaacctag gctggacaca tttgctgcct tctcctcaag |
| 1261 | gaagaagaac ccaagcccct cctcccagta acccctcctc acatcctgcc accccccctc |
| 1321 | aagccccacc ccctttcagg ttcattgctc agccaagctt gtcagcagcc tgtaggatca |
| 1381 | tggttcaagt gacaataaag gaagaaagta gaacaaaaaa aaaaaaaaaa a |

SEQ ID NO: 26 Mouse CD74 Isoform 1 Amino Acid Sequence (NP_001036070.1)

| | |
|---|---|
| 1 | mddqrdlisn heqlpilgnr prepercsrg alytgvsvlv alllagqatt ayflyqqqgr |
| 61 | ldkltitsqn lqleslrmkl pksakpvsqm rmatpllmrp msmdnmllgp vknvtkygnm |
| 121 | tqdhvmhllt rsgpleypql kgtfpenlkh lknsmdgvnw kifeswmkqw llfemsknsl |
| 181 | eekkpteapp kvltkcqeev shipavypga frpkcdengn ylplqchgst gycwcvfpng |
| 241 | tevphtksrg rhncsepldm edlssglgvt rqelgqvtl |

SEQ ID NO: 27 Mouse CD74 Transcript Variant 2 CDNA Sequence (NM_010545.3;
CDS: 6-733)

| | |
|---|---|
| 1 | agacacacag cagcagcagc agcagcagca gcagcaacag cagcaggagc agcagcgcct |
| 61 | gtgggaaaaa ctagaggcta gagccatgga tgaccaacgc gacctcatct ctaaccatga |
| 121 | acagttgccc atactgggca accgccctag agagccagaa aggtgcagcc gtggagctct |
| 181 | gtacaccggt gtctctgtcc tggtggctct gctcttggct gggcaggcca ccactgctta |
| 241 | cttcctgtac cagcaacagg gccgcctaga caagctgacc atcacctccc agaacctgca |
| 301 | actggagagc cttcgcatga agcttccgaa atctgccaaa cctgtgagcc agatgcggat |
| 361 | ggctactccc ttgctgatgc gtccaatgtc catggataac atgctccttg ggcctgtgaa |
| 421 | gaacgttacc aagtacggca acatgaccca ggaccatgtg atgcatctgc tcacgaggtc |
| 481 | tggacccctg gagtacccgc agctgaaggg gaccttccca gagaatctga agcatcttaa |
| 541 | gaactccatg gatggcgtga actggaagat cttcgagagc tggatgaagc agtggctctt |
| 601 | gtttgagatg agcaagaact ccctggagga gaagaagccc accgaggctc cacctaaaga |
| 661 | gccactggac atggaagacc tatcttctgg cctgggagtg accaggcagg aactgggtca |
| 721 | agtcaccctg tgaagacaga ggccagctct gcacagcagc agcgccccct gctctcctgt |
| 781 | gcctcagccc ttcttatgtt ccctgatgtc acaccccact tcccgtctcc ctgcaccctg |
| 841 | gggcttgaga ctggtgtgtg tttcatcgtc ccaggacacg gcaaatgaag tcagaacaga |
| 901 | aggaggacgc tggagggcct tgctggctac cgctatctaa agggaacccc catttctgac |
| 961 | ccattagtag tcttgaatgt ggggctctga gataaaggcc cgcagacagg gacaagggat |
| 1021 | gccctaccct taacctaggc tggacacatt tgctgccttc tcctcaagga agaagaaccc |
| 1081 | aagcccctcc tcccagtaac ccctcctcac atcctgccac cccccctcaa gccccacccc |
| 1141 | ctttcaggtt ccttgctcag ccaagcttgt caggagcctg taggatcatg gttcaagtga |
| 1201 | caataaagga agaaagtaga acaaaaaaaa aaaaaaaaa |

SEQ ID NO: 28 Mouse CD74 Isoform 2 Amino Acid Sequence (NP_034675.1)

| | |
|---|---|
| 1 | mddqrdlisn heqlpilgnr prepercsrg alytgvsvlv alllagqatt avflyqqqgr |
| 61 | ldkltitsqn lqleslrmkl pksakpvsqm rmatpllmrp msmdnmllgp vknvtkygnm |
| 121 | tqdhvmhllt rsgpleypql kgtfpenlkh lknsmdgvnw kifeswmkqw llfemsknsl |
| 181 | eekkpteapp kepldmedls sglgvtrqel gqvtl |

SEQ ID NO: 29 Human CD207 cDNA Sequence (NM_015717.4; CDS: 48-1034)

| | |
|---|---|
| 1 | ggcagccaga agcacctgtg ctcccaggat aagggtgagc actcaggatg actgtggaga |
| 61 | aggaggcccc tgatgcgcac ttcactgtgg acaaacagaa catctccctc tggccccgag |
| 121 | agcctcctcc caagtccggt ccatctctgg tcccggggaa aacacccaca gtccgtgctg |
| 181 | cattaatctg cctgacgctg gtcctggtcg cctccgtcct gctgcaggcc gtcctttatc |
| 241 | cccggtttat gggcaccata tcagatgtaa agaccaatgt ccagttgctg aaaggtcgtg |
| 301 | tggacaacat cagcaccctg gattctgaaa ttaaaaagaa tagtgacggc atggaggcag |
| 361 | ctggcgttca gatccagatg gtgaatgaga gcctgggtta tgtgcgttct cagttcctga |
| 421 | agttaaaaac cagtgtggag aaggccaacg cacagatcca gatcttaaca agaagttggg |
| 481 | aagaagtcag taccttaaat gcccaaatcc cagagttaaa aagtgatttg gagaaagcca |
| 541 | gtgctttaaa tacaaagatc cgggcactcc agggcagctt ggagaatatg agcaagttgc |
| 601 | tcaaacgaca aaatgatatt ctacaggtgg tttctcaagg ctggaagtac ttcaagggga |
| 661 | acttctatta cttttctctc attccaaaga cctggtatag tgccgagcag ttctgtgtgt |
| 721 | ccaggaattc acacctgacc tcggtgacct cagagagtga gcaggagttt ctgtataaaa |
| 781 | cagcgggggg actcatctac tggattggcc tgactaaagc agggatggaa ggggactggt |
| 841 | cctgggtgga tgacacgcca ttcaacaagg tccaaagtgt gaggttctgg attccaggtg |
| 901 | agcccaacaa tgctgggaac aatgaacact gtggcaatat aaaggctccc tcacttcagg |
| 961 | cctggaatga tgccccatgt gacaaaacgt ttcttttcat ttgtaagcga ccctatgtcc |
| 1021 | catcagaacc gtgacaggac aggctcccaa gctcactctt tgagctccaa cgcttgttaa |
| 1081 | acatgaggaa atgcctcttt gttccccaga ctccaggatg actttgcacg ttaatttttc |
| 1141 | ttgcttcaaa attgtcccac agtggcattc tggagtccgt ctgtcttggc tggaaattct |
| 1201 | ctgacgtctt ggaggcagct ggaatggaaa ggagaattca ggttaaagtg ggaggggtgg |
| 1261 | gtagagagga tttagaagtt ccaattgccc tgctaaggag gatcaagacc cgtaatccgg |
| 1321 | cataacaccc tggggttttc cactctttca gagaaacctc agcttcatca catcaaagtt |
| 1381 | actccagagc aaccaagcaa ttctcctgat attgtcatcc agggcttttc ttggccaaac |
| 1441 | cccctagaat ttccatgtct ctgcttagct gtgctggcag ctagcagctg gctgtgtttg |
| 1501 | cagtgcaaat agctctgttc ttggaaatcc tgctcatggt atgtccccag tggtttcttc |
| 1561 | atccacatca tctaaagcct gaacccgttc ttctctggtt caagtcagtg gctgacacgg |
| 1621 | acttgtatct ccttcagagc tcggctggca cccagcctcc cttctccttc cactccctta |
| 1681 | gtacactgga gtgccgagcc ctgccttcca cccagcgtcc atccagcccc tgtcctcacc |
| 1741 | tctccggcac ctcctcctcc ttctgcattt cctatcttcc tgtgtcttgt gcatgggaag |
| 1801 | cagccttcag tgccttcatg aattcacctt ccagcttcct cagaataaaa tgctgcctgg |
| 1861 | gtcaaggact caaaaaaaaa aaaaaa |

SEQ ID NO: 30 Human CD207 Amino Acid Sequence (NP_056532.4)

| | |
|---|---|
| 1 | mtvekeapda hftvdkqnis lwprepppks gpslvpgktp tvraaliclt lvlvasvllq |
| 61 | avlyprfmgt isdvktnvql lkgrvdnist ldseikknsd gmeaagvqiq mvneslgyvr |
| 121 | sqflklktsv ekanaqiqil trsweevstl naqipelksd lekasalntk iralqgslen |
| 181 | mskllkrqnd ilqvvsqgwk yfkqnfyyfs lipktwysae qfcvsrnshl tsvtseseqe |
| 241 | flyktaggli ywigltkagm egdwswvddt pfnkvqsvrf wipgepanag nnehcgnika |
| 301 | pslqawndap cdktflfick rpyvpsep |

SEQ ID NO: 31 Mouse CD207 cDNA Sequence (NM_144943.3; CDS: 59-1054)

| | |
|---|---|
| 1 | tttcccgttt ctttctggat aaaaaggtgc ttggggagac agatattgag aatttcctat |
| 61 | gccagaggca gagatgaagg aggaggctcc cgaagcgcac ttcacagtgg acaaacagaa |
| 121 | catctctctc tggcctcgag agcctcctcc caagcaagat ctgtctccag ttctaaggaa |
| 181 | acctctctgt atctgcgtgg ccttcacctg cctggcattg gtgctggtca cctccattgt |
| 241 | gcttcaggct gttttctatc ctaggttgat gggcaaaata ttggatgtga agagtgatgc |
| 301 | ccagatgttg aaaggtcgtg tggacaacat cagcaccctg ggttctgatc ttaagactga |
| 361 | aagaggtcgt gtggacgatg ctgaggttca gatgcagata gtgaacacca ccctcaagag |
| 421 | ggtgcgttct cagatcctgt ctttggaaac cagcatgaag atagccaatg atcagctcca |
| 481 | gatattaaca atgagctggg gagaggttga cagtctcagt gccaaaatcc cagaactgaa |
| 541 | aagagatctg gataaagcca gcgccttgaa cacaaaggtc caaggactac agaacagctt |
| 601 | gccgaatgtc aacaagctgc tcaaacaaca gagtgacatt ctggagatgg tggctcgagg |
| 661 | ctggaagtat ttctcgggga acttctatta cttttcacgc accccaaaga cctggtacag |
| 721 | cgcagagcag ttctgtattt ctagaaaagc tcacctgacc tcagtgtcct cagaatcgga |
| 781 | acaaaagttt ctctacaagg cagcagatgg aattccacac tggattggac ttaccaaagc |
| 841 | agggagcgaa ggggactggt actgggtgga ccagacatca ttcaacaagg agcaaagtag |
| 901 | gaggttctgg attccaggtg aacccaacaa cgcagggaac aatgagcact gtgccaatat |
| 961 | cagggtgact gccctgaagt gctggaacga tggtccctgt gacaatacat ttcttttcat |
| 1021 | ctgcaagagg ccctacgtcc aaacaactga atgacagatc tggcctgagc tcggcatctg |
| 1081 | tggggcaaca gtgacctggc tgaagagatg tctctctccc tgaggctcca agattgctct |
| 1141 | gtactttacg tttttttctt gcttgaaaat tgtcccaaac acagcctgtg gtcttgctgt |
| 1201 | cttggctggc agttctctgc tcctggaggc cttggaggag cttgggttaa acgggtgagg |
| 1261 | acctgaagag ggcgtagcag tccttactgc ccaggcgagg caggtcagca caccaaacag |
| 1321 | gttgtttaga ttttcctgat ccttctcaga agccttggct gaccatataa aagctacatt |
| 1381 | caaatatgac cagtatttga ggaggcagac atgcccaaat ttaaccatga tacaatttat |
| 1441 | acaacatgta ttagaacacc tcatggtatg ctcaaaatat gtaaatatgt tgtttttatg |
| 1501 | tgcctattgc aaataaatgt aatattacta |

SEQ ID NO: 32 Mouse CD207 Amino Acid Sequence (NP_659192.2)

| | |
|---|---|
| 1 | mpeaemkeea peahftvdkq nislwprepp pkqdlspvlr kplcicvaft clalvlvtsi |
| 61 | vlqavfyprl mgkildvdsd aqmlkgrvdn istlgsdlkt ergrvddaev qmgivnttlk |
| 121 | rvrsqilsle tsmkiandql qiltmswgev dslsakipel krdldkasal ntkvqglqns |
| 181 | lenvnkllkq qsdilemvar gwkyfsgnfy yfsrtpktwy saeqfcisrk ahltsvsses |
| 241 | eqkflykaad giphwigltk agsegdwywv dqtsfnkeqs rrfwipgepn nagnnehcan |
| 301 | irvsalkcwn dgpcdntflf ickrpyvqtt e |

SEQ ID NO: 33 Human LRRC25 cDNA Sequence (NM_145256.2; CDS: 643-1560)

| | |
|---|---|
| 1 | gccagaggaa cgccagcgac cccagcagcg ctgcggacgg tgctggccgt ggccgctgcg |
| 61 | gcccccgtgt ccaggtgggc caggacgcag cctctgggcg ccgtcgcttt tccagcatcg |
| 121 | cagaggcaaa agcgtggcag tgggacccaa aaggtaggac tgaggctcta gaacttgcac |
| 181 | ctgtgcaggg actgcaaacc agacctggga ggaccctttc agcagcccdc actccaccct |
| 241 | atcccaggac ttcccagcga cccgccgttc tgggagatac cgggagcgtg atcagggggc |
| 301 | ggggccgttt ccaaggcaac cgcttatttg catagggtcc cgtcctggcc aacgagggcg |
| 361 | ccccaaatgt tcaggacata gaagaagggg ttaactggcc cggatctcct cctcgccttc |
| 421 | caagcccgct aagcactggg gttatctacc cattccccag aaggggagac tgaggcagcc |
| 481 | caccagccaa aggaggcgac cagactgggg ctgcgtttta ccatttcaga agcggcttga |
| 541 | gctggtctga gctataataa taaacactgg cggtggaggc gagggcgacc acagggctga |
| 601 | ggtcagggct aggattccgg tgtctctacg taggttgctt gaatgggggg caccctggca |
| 661 | tggacgctgc tgttgccgct gctgctgcgg gagtcagaca gcctagaacc gtcgtgcacc |
| 721 | gtgtcctccg cggatgtgga ctggaacgcg gagttcagtg ccacgtgcct gaatttcagt |
| 781 | ggcctcagcc tgagcctgcc tcacaaccag tctctgcggg ccagcaacgt gattctcctt |
| 841 | gacctgtctg ggaacggcct gcgagagctt ccagtgacct tctttgccca cctgcagaag |
| 901 | cttgaggtcc tgaacgtgct acgcaacccc ttgtctcgtg tggatggggc gctggccgcc |
| 961 | cgctgtgacc ttgacctgca ggccgactgc aactgtgccc tggagtcctg gcacgacatc |
| 1021 | cgccgagaca actgctctgg ccagaagcct ctgctctgct gggacacaac cagctcccag |
| 1081 | cacaacctct ctgccttcct ggaggtcagc tgcgcccctg gcctggcctc tgcaactatc |
| 1141 | ggggcagtgg tggtcagcgg gtgcctgctt cttggacttg ccatcgctgg ccctgtgctg |
| 1201 | gcctggagac tctggcgatg ccgagtggcc agaagccggg agctgaacaa accctgggct |
| 1261 | gctcaggatg ggcccaagcc cggtttaggc ttgcagccac ggtacggcag ccggagcgcc |
| 1321 | cccaagcccc aagtggccgt gccatcctgc ccctccactc ccgactatga gaacatgttt |
| 1381 | gtgggccagc cagcagccga gcaccagtgg gatgaacaag gggctcaccc ttcagaggac |
| 1441 | aatgactttt acatcaacta caaggacatc gacctggctt cccagcctgt ctactgtaac |
| 1501 | ctgcagtcac tgggccaggc cccaatggat gaagaggagt acgtgatccc cgggcactga |
| 1561 | gcctaacctg tcctaacctc cacccagaac cccttcagtc cctgctgggt gactcagggc |
| 1621 | gtcctaacgc ctccatggcc tcagtttccc catctgaaga atgggtacag gaaaggattg |
| 1681 | tccttgaggc cccaggaagc tctgccgccc cctccctgtc cctcatgccg ctcctcagct |
| 1741 | ccctcagctc ctagaggggg aagaggagag acccccaaca aggggacagg acggtcactg |
| 1801 | tgccaatcct gtcatcaccc tcctgtggat gtacaggcag tgctcaataa atgcttcgag |
| 1861 | gctgatgagg ctgctggctc agggtgcgtg ggttcctcaa ggtggggatt tctgagttct |
| 1921 | aagaccaagt ctccatctga gactcccaaa ttgctcccca cctcccatcc ctgttttttt |
| 1981 | ttgttgttgt tgtttgtttg tttgtttttg aaactgagtg tcactctgtc acccaggctg |
| 2041 | gagtgcaatg ctgcggtctc agctcactgc aacctccgcc tcctgggttc aagtgattct |
| 2101 | cctgcctcag cctcctgagt agctgggatt acagcacccg ccaccatgcc gagctaattt |
| 2161 | ttgtatttat aatagagatg gggtttcgcc atgttggcca ggctggtctc gaactcctga |
| 2221 | cctcaagcga tctgcccgcc tcggcctcct gaagtgctgg gattacaggc gtggccactg |
| 2281 | cgcccaggca cattcctccc ttctgcccct ctcagggccc cttcccaggt ccctgatctc |
| 2341 | caggcttggc ctccagagca gcccacacca accccaaaat aaaaaaatgt atatattcct |
| 2401 | ttaaaaaaaa aaaaaaaaaa aaaaaaaaaa |

SEQ ID NO: 34 Human LRRC25 Amino Acid Sequence (NM_660299.2)

| | |
|---|---|
| 1 | mggtlawtll lplllresds lepsctvssa dvdwnaefsa tclnfsglsl slphnqslra |
| 61 | snvilldlsg nglrelpvtf fahlqklevl nvilnplsrv dgalaarcdl dlqadcncal |
| 121 | eswhdirrdn csgqkpllcw dttssqhnls aflevscapg lasatigavv vsgclllgla |
| 181 | iagpvlawrl wrcrvarsre lnkpwaaqdg pkpglglqpr ygsrsapkpq vavpscpstp |
| 241 | dyenmfvgqp aaehqwdeqg ahpsedndfy inykdidlas qpvycnlqsl gqapmdeeey |
| 301 | vipgh |

SEQ ID NO: 35 Mouse LRRC25 cDNA Sequence (NM_153074.3; CDS: 193-1086)

| | |
|---|---|
| 1 | ctcctcctct cgtgagagcc tgaggctggc agagggctct ctgctgtccc ctccactcct |
| 61 | acacctactc gtcttcccgt cttcccgcag gcgtggatta acaggtggaa agcaccagga |
| 121 | gctgtgaacc ccaacccaga ccctaggacc ctgaggctta cgagacatca cgaaggccag |
| 181 | gaggttgctg ggatgggaag catcagaact aggttgctgt ggttatgtct cctgatgctg |
| 241 | ttggccctgc ttcacaagtc aggaagtcaa gatctcacct gcatggttca cccgagcagg |
| 301 | gtagactgga ctcagacatt taatggcacc tgcctcaatt tcagtggcct tggcctgtcc |
| 361 | ctgccaagga gccccttgca ggccagccat gctcaagtcc tggacctgtc taagaatggc |
| 421 | ctgcaggtgc tccctggggc tttcttcgac aagctggaaa agctgcagac cctgattgtc |
| 481 | acccacaacc agctggacag tgtggacagg tccctggcct tgcgctgtga cctggagctc |
| 541 | aaggcagact gcagctgtgg gctggcctcc tggtatgctc tccgccagaa ctgctccggg |
| 601 | cagcagcagc tactgtgtct acacccagcc accgaagctc caaggaacct ctccaccttc |
| 661 | cttcaggtca gctgtccccc cagctggggc ccggggacca ttggagccct tgttgctggg |
| 721 | actatctccc tggctgtggc tgtcagtgga tctgtgctgg cctggagact tcttcgccgc |
| 781 | cgccgcagag ccagtgagca cagcctcagc aaagcccaga tgtccccaca cgatatcccc |
| 841 | aaaccagtga cagatttcct gccaaggtac agcagccggc gacctggccc caaggcccca |
| 901 | gactcaccac ccagcaggtt cacaatggat tatgagaatg tctttattgg ccaggrggcc |
| 961 | gaggactgct catggtctgc agccagaaac agcccttctg gggacagtga ctgctacatg |
| 1021 | aactacagga gtgtcgacca ggactctcag cccgtctatt gcaacctgga gtccctgggg |
| 1081 | cgatgaggag agtgtggtct cctggcgctg aaccagcctc cgacagcccc caggatccag |
| 1141 | cacgctcaac atcacagggg gtagaggaca ccccaccccc ccacccccaa agcagaagga |
| 1201 | gggtcagaaa caaccctccg gtcagtgtgc atgcatgtga tgctcaataa aagctctggg |
| 1261 | agcagctgac tct |

SEQ ID NO: 36 Mouse LRRC25 Amino Acid Sequence (NP_694714.1)

| | |
|---|---|
| 1 | mgsirtrllw lcllmllall hksgsqdltc mvhpsrvdwt qtfngtclnf sglglslprs |
| 61 | plqashaqvl dlsknglqvl pgaffdklek lqtlivthnq ldsvdrslal rcdlelkadc |
| 121 | scglaswyal rqncsgqqql lclhpateap rnlstflqvs cppswgpgti galvagtisl |
| 181 | avavsgsvla wrllrrrrra sehslskaqm sphdipkpvt dflpryssrr pgpkapdspp |
| 241 | srftmdyenv figqpaedcs wsaarnspsg dsdcymnyrs vdqdsqpvyc nleslgr |

SEQ ID NO: 37 Human SELPLG Transcript Variant 1 cDNA Sequence
(NM_001206609.1; CDS: 178-1464)

| | |
|---|---|
| 1 | aatcatccga gaaccttgga gggtggacag tgcccctttt acagatgaga aaactgaggc |
| 61 | ttgaagggga gaagcagctg cctctggcgg catggcttct ggctgcagga tgcccatgga |
| 121 | gttcgtggtg accctaggcc tgtgtctcgg cttcctttgc tgaacttgaa caggaagatg |
| 181 | gcagtggggg ccagtggtct agaaggagat aagatggctg gtgccatgcc tctgcaactc |
| 241 | ctcctgttgc tgatcctact gggccctggc aacagcttgc agctgtggga cacctgggca |
| 301 | gatgaagccg agaaagcctt gggtcccctg cttgcccggg accggagaca ggccaccgaa |
| 361 | tatgagtacc tagattatga tttcgtgcca gaaacggagc ctccagaaat gctgaggaac |
| 421 | agcactgaca ccactcctct gactgggcct ggaacccctg agtctaccac tgtggagcct |
| 481 | gctgcaaggc gttctactgg cctggatgca ggaggggcag tcacagagct gaccacggag |
| 541 | ctggccaaca tggggaacct gtccacggat tcagcagcta tggagataca gaccactcaa |
| 601 | ccagcagcca cggaggcaca gaccactcaa ccagtgccca cggaggcaca gaccactcca |
| 661 | ctggcagcca cagaggcaca gacaactcga ctgacggcca cggaggcaca gaccactcca |
| 721 | ctggcagcca cagaggcaca gaccactcca ccagcagcca cggaagcaca gaccactcaa |
| 781 | cccacaggcc tggaggcaca gaccactgca ccagcagcca tggaggcaca gaccactgca |
| 841 | ccagcagcca tggaagcaca gaccactcca ccagcagcca tggaggcaca gaccactcaa |
| 901 | accacagcca tggaggcaca gaccactgca ccagaagcca cggaggcaca gaccactcaa |
| 961 | cccacagcca cggaggcaca gaccactcca ctggcagcca tggaggccct gtccacagaa |
| 1021 | cccagtgcca cagaggccct gtccatggaa cctactacca aaagaggtct gttcataccc |
| 1081 | ttttctgtgt cctctgttac tcacaagggc attcccatgg cagccagcaa tttgtccgtc |
| 1141 | aactacccag tgggggcccc agaccacatc tctgtgaagc agtgcctgct ggccatccta |
| 1201 | atcttggcgc tggtggccac tatcttcttc gtgtgcactg tggtgctggc ggtccgcctc |
| 1261 | tcccgcaagg gccacatgta ccccgtgcgt aattactccc ccaccgagat ggtctgcatc |
| 1321 | tcatccctgt tgcctgatgg gggtgagggg ccctctgcca cagccaatgg gggcctgtcc |
| 1381 | aaggccaaga gcccgggcct gacgccagag cccagggagg accgtgaggg ggatgacctc |
| 1441 | accctgcaca gcttcctccc ttagctcact ctgccatctg ttttggcaag accccacctc |
| 1501 | cacgggctct cctgggccac ccctgagtgc ccagacccca ttccacagct ctgggcttcc |
| 1561 | tcggagaccc ctggggatgg ggatcttcag ggaaggaact ctggccaccc aaacaggaca |
| 1621 | agagcagcct ggggccaagc agacgggcaa gtggagccac ctctttcctc cctccgcgga |
| 1681 | tgaagcccag ccacatttca gccgaggtcc aaggcaggag gccatttact tgagacagat |
| 1741 | tctctccttt ttcctgtccc ccatcttctc tgggtccctc taacatctcc catggctctc |
| 1801 | cccgcttctc ctggtcactg gagtctcctc cccatgtacc caaggaagat ggagctcccc |
| 1861 | catcccacac gcactgcact gccattgtct tttggttgcc atggtcacca aacaggaagt |
| 1921 | ggacattcta agggaggagt actgaagagt gacggacttc tgaggctgtt tcctgctgct |
| 1981 | cctctgactt ggggcagctt gggtcttctt gggcacctct ctgggaaaac ccagggtgag |
| 2041 | gttcagcctg tgagggctgg gatgggtttc gtgggcccaa gggcagacct ttctttggga |
| 2101 | ctgtgtggac caaggagctt ccatctagtg acaagtgacc cccagctatc gcctcttgcc |
| 2161 | ttcccctgtg gccactttcc agggtggact ctgtcttgtt cactgcagta tcccaactgc |
| 2221 | aggtccagtg caggcaataa atatgtgatg gacaaacgat aggggaatcc ttcaaggttt |
| 2281 | caaggctgtc tccttcaggc agccttcccg gaattctcca tccctcagtg caggatgggg |
| 2341 | gctggtcctc agctgtctgc cctcagcccc tggcccccca ggaagcctct ttcatgggct |
| 2401 | gttaggttga cttcagtttt gcctcttgga caacaggggg tcttgtacat ccttgggtga |
| 2461 | ccaggaaaag ttcaggctat ggggggccaa agggagggct gccccttccc caccagtgac |
| 2521 | cactttattc cacttcctcc attacccagt tttggcccac agagtttggt cccccccaaa |
| 2581 | cctcggacca atatccctct aaacatcaat ctatcctcct gttaaagaaa aaaaaaaa |

SEQ ID NO: 38 Human SELPLG Isform 1 Amino Acid Sequence (NP_001193538.1)

| | |
|---|---|
| 1 | mavgasgleg dkmagamplq lllllillgp gnslqlwdtw adeaekalgp llardrrqat |
| 61 | eyeyldydfl peteppemlr nstdttpltg pgtpesttve paarrstgld aggavteltt |
| 121 | elanmgnlst dsaameiqtt qpaateaqtt qpvpteaqtt plaateaqtt rltateaqtt |
| 181 | plaateaqtt ppaateaqtt qptgleaqtt apaameaqtt apaameaqtt ppaameaqtt |
| 241 | qttameaqtt apeateaqtt qptateaqtt plaamealst epsatealsm epttkrglfi |
| 301 | pfsvssvthk gipmaasnls vnypvgapdh isvkqcllai lilalvatif fvctvvlavr |
| 361 | lsrkghmypv rnysptemvc issllpdgge gpsatanggl skakspgltp epredregdd |
| 421 | ltlhsflp |

SEQ ID NO: 39 Human SELPLG Transcript Variant 2 cDNA Sequence
(NM_003006.4; CDS: 161-1399)

| | |
|---|---|
| 1 | acacacagcc attgggggtt gctcggatcc gggactgccg cagggggtgc cacagcagtg |
| 61 | cctggcagcg tgggctggga ccttgtcact aaagcagaga agccacttct tctgggccca |
| 121 | cgaggcagct gtcccatgct ctgctgagca cggtggtgcc atgcctctgc aactcctcct |
| 181 | gttgctgatc ctactgggcc ctggcaacag cttgcagctg tgggacacct gggcagatga |
| 241 | agccgagaaa gccttgggtc ccctgcttgc ccgggaccgg agacaggcca ccgaatatga |
| 301 | gtacctagat tatgatttcc tgccagaaac ggagcctcca gaaatgctga ggaacagcac |
| 361 | tgacaccact cctctgactg ggcctggaac ccctgagtct accactgtgg agcctgctgc |
| 421 | aaggcgttct actggcctgg atgcaggagg ggcagtcaca gagctgacca cggagctggc |
| 481 | caacatgggg aacctgtcca cggattcagc agctatggag atacagacca ctcaaccagc |
| 541 | agccacggag gcacagacca ctcaaccagt gcccacggag gcacagacca ctccactggc |
| 601 | agccacagag gcacagacaa ctcgactgac ggccacggag gcacagacca ctccactggc |
| 661 | agccacagag gcacagacca ctccaccagc agccacggaa gcacagacca ctcaacccac |
| 721 | aggcctggag gcacagacca ctgcaccagc agccatggag gcacagacca ctgcaccagc |
| 781 | agccatggaa gcacagacca ctccaccagc agccatggag gcacagacca ctcaaaccac |
| 841 | agccatggag gcacagacca ctgcaccaga agccacggag gcacagacca ctcaacccac |
| 901 | agccacggag gcacagacca ctccactggc agccatggag gccctgtcca cagaacccag |
| 961 | tgccacagag gccctgtcca tggaacctac taccaaaaga ggtctgttca tacccttttc |
| 1021 | tgtgtcctct gttactcaca agggcattcc catggcagcc agcaatttgt ccgtcaacta |
| 1081 | cccagtgggg gccccagacc acatctctgt gaagcagtgc ctgctggcca tcctaatctt |
| 1141 | ggcgctggtg gccactatct tcttcgtgtg cactgtggtg ctggcggtcc gcctchcccg |
| 1201 | caagggccac atgtaccccg tgcgtaatta ctcccccacc gagctggtct gcatctcatc |
| 1261 | cctgttgcct gatgggggtg aggggccctc tgccacagcc aatgggggcc tgtccaaggc |
| 1321 | caagagcccg ggcctgacgc cagagcccag ggaggaccgt gagggggatg acctcaccct |
| 1381 | gcacagcttc ctcccttagc tcactctgcc atctgttttg gcaagacccc acctccacgg |
| 1441 | gctctcctgg gccacccctg agtgcccaga ccccattcca cagctctggg cttcctcgga |
| 1501 | gacccctggg gatggggatc ttcagggaag gaactctggc cacccaaaca ggacaagagc |
| 1561 | agcctggggc caagcagacg ggcaagtgga gccacctctt tcctccctcc gcggatgaag |
| 1621 | cccagccaca tttcagccga ggtccaaggc aggaggccat ttacttgaga cagattctct |
| 1681 | cctttttcct gtcccccatc ttctctgggt ccctctaaca tctcccatgg ctctccccgc |
| 1741 | ttctcctggt cactggagtc tcctccccat gtacccaagg aagatggagc tcccccatcc |
| 1801 | cacacgcact gcactgccat tgtcttttgg ttgccatggt caccaaacag gcagtggaca |
| 1861 | ttctaaggga ggagtactga agagtgacgg acttctgagg ctgtttcctg ctgctcctct |
| 1921 | gacttggggc agcttgggtc ttcttgggca cctctctggg aaaacccagg gtgaggttca |
| 1981 | gcctgtgagg gctgggatgg gtttcgtggg cccaagggca gacctttctt tgggactgtg |
| 2041 | tggaccaagg agcttccatc tagtgacaag tgacccccag ctatcgcctc ttgccttccc |
| 2101 | ctgtggccac tttccagggt ggactctgtc ttgttcactg cagtatccca actgcaggtc |
| 2161 | cagtgcaggc aataaatatg tgatggacaa acgatagcgg aatccttcaa ggtttcaagg |
| 2221 | ctgtctcctt caggcagcct tcccggaatt ctccatccct cagtgcagga tgggggctgg |
| 2281 | tcctcagctg tctgccctca gcccctggcc ccccaggaag cctctttcat gggctgttag |
| 2341 | gttgacttca gttttgcctc ttggacaaca gggggtcttg tacatccttg ggtgaccagg |
| 2401 | aaaagttcag gctatggggg gccaaaggga gggctgcccc ttccccacca gtgaccactt |
| 2461 | tattccactt cctccattac ccagttttgg cccacagagt ttggtccccc ccaaacctcg |
| 2521 | gaccaatatc cctctaaaca tcaatctatc ctcctgttaa agaaaaaaaa aaa |

SEQ ID NO: 40 Human SELPLG Isoform 1 Amino Acid Sequence (NP_002997.2)

| | |
|---|---|
| 1 | mplqllllll ilgpgnslql wdtwadeaek algpllardr rqateyeyld ydflpetepp |
| 61 | emlrnstdtt pltgpgtpes ttvepaarrs tgldaggdvt elttelanmg nlstdsaame |
| 121 | iqttqpaate aqttgpvpte agttplaate aqttrltate aqttplaate aqttppaate |
| 181 | aqttqptgle aqttapaame aqttapaame aqttppaame aqttgttame aqttapeate |
| 241 | aqttqptate aqttplaame alstepsate alsmepttkr glfipfsvss vthkgipmaa |
| 301 | snlsvnypvg apdhisvkqc llaililalv atiffvctvv lavrlsrkgh mypvrnyspt |
| 361 | emvcissllp dggegpsata ngglskaksp gltpepredr egddltlhsf lp |

SEQ ID NO: 41 Mouse SELPLG cDNA Sequence (NM_009151.3; CDS: 159-1412)

| | |
|---|---|
| 1 | attctcgctt ccttcttcca caccctgccg ttgggggttg gcgggcagat tgggaccaca |
| 61 | agtgtctggc agtgtggact ggggccctgt cactgaggca gagtcgtttg cttctgggcc |
| 121 | ctgaggcagc tgccccatgc tctgttgggc acggtaccat gtccccaagc ttccttgtgc |
| 181 | tgctgaccat cttgggccct ggcaacagcc ttcagctgca ggacccctgg gggcatgaaa |
| 241 | ccaaggaagc cccgggtcct gtgcatctcc gggaacggag gcaggtggtt ggggatgacg |
| 301 | attttgagga ccctgactat acgtataaca cagacccccc agaattgctg aaaaatgtca |
| 361 | ccaacaccgt ggctgctcac cctgagctgc caaccaccgt ggtcatgcta gagagagatt |
| 421 | ccacgagcgc tggaacctcc gagagagcca ctgagaagat tgccaccact gaccctactg |
| 481 | ccccaggtac aggagggaca gctgttggga tgctgagcac agactctgcc acacagtgga |
| 541 | gtctaacctc agtagagacc gtccaaccag catccacaga ggtagagacc tcgcagccag |
| 601 | cacccatgga ggcagagacc tcgcagccag cacccatgga ggcagagacc tcgcagccag |
| 661 | cacccatgga ggcagagacc tcgcagccag cacccatgga ggcagacacc tcgcagccag |
| 721 | cacccatgga ggcagacacc tcaaagccag cacccacgga ggcagagacc tcaaagccag |
| 781 | cacccacgga ggcagagacc tctcagccag cacccaacga ggcagagacc tcaaaaccag |
| 841 | cacccacgga ggcagagacc tcaaaaccag cacccacgga ggcagagacc acccagcttc |
| 901 | ccaggattca ggctgtaaaa actctgttta caacgtctgc agccaccgaa gtcccttcca |
| 961 | cagaacctac caccatggag acggcgtcca cagagtctaa cgagtctacc atcttccttg |
| 1021 | ggccatccgt gactcactta cctgacagcg gcctgaagaa agggctgatt gtgacccctg |
| 1081 | ggaattcacc tgccccaacc ctgccaggga gttcagatct catcccggtg aagcaatgtc |
| 1141 | tgctgattat cctcatcttg gcttctctgg ccaccatctt cctcgtgtgc acagtggtgc |
| 1201 | tggcggtccg tctgtcccgt aagacccaca tgtacccagt gcggaactac tcccccacgg |
| 1261 | agatgatctg catctcgtcc ctgctacctg aggggggaga cggggcccct gtcacagcca |
| 1321 | atgggggcct gcccaaggtc caggacctga agacagagcc cagtggggac cgggatgggg |
| 1381 | acgacctcac cctgcacagc ttcctccctt agactcccct gcctgcccac ctaagcgaga |
| 1441 | catttgctag ctccactctc acccgctggt cacagaggtc atagatctgg gcttcctggg |
| 1501 | tgaaatgtat tcacgggagt ctttagagcg cccaccgctg tgtgtctccc tgcaggtcac |
| 1561 | tggatacctg tccttgcgtt ctccagaaag actcagctcc cttattccac tcccaaaagc |
| 1621 | tactctgttg gttgccatgg taacccggta agagaggagc tttgtgggag gccgccatgt |
| 1681 | ctgcttctct gattccagtg gcaggtagcc tggctttccc aggtccctgg cttggaggga |
| 1741 | tggtccttcc tttgggcccg tgtgaaccaa cgagtttccg tacagtgaca gaatgacctc |
| 1801 | gcgctgcggc ctggcccagc acaggcatcc aataaacata ttataataaa cgatagctga |
| 1861 | gtccttcatg tgcctaggct gccatctcca gccctcccgg agggcgctta gaccattgtc |
| 1921 | cacaccgctc ttagacatct aatacatgct tgggcaactg caaggggcac tggagggttt |
| 1981 | aagcgacacg tggtaggtag catatgccca tcacccaagc agtacaggag ttcaaggtca |
| 2041 | tccttggctc gttaactgcc tgggctacat gagaccctgt ctccgagaaa actaaagctg |
| 2101 | ggtctggctg gctggctcag ccggtgaagg tgcttgctgc tacgcctcat ggcctaagct |
| 2161 | ccaggggggc cctcatggtg gaaggagaag gctgactctc caaaactgtt ctctggcatc |
| 2221 | catactcaca ggtaaatatg aacacaacta cacaagctag agaactttat tgaatctacc |
| 2281 | ctttccaagg tgggtcaaag gaggaaggtc cctttggtgt tggccaattt ctttttaaag |
| 2341 | atttatttat gtttatgagt atgctgtcac tgtcttcaga cacagcagaa gagggcatcg |
| 2401 | gatcccatta cagacttgag ccaccccgtg ggtactggga attgaactca ggaactctgg |
| 2461 | aagagcagtc agtgctctta acagctgagc catcccttca gcagccctgt cagatttttt |
| 2521 | tttttaatca ccaaagagat tttattcaag tttctaacac aaatgagtta ttttggtttt |
| 2581 | gaattacaga actaagtcca aact |

SEQ ID NO: 42 Mouse SELPLG Amino Acid Sequence (NP_033177.3)

| | |
|---|---|
| 1 | mspsflvllt ilgpgnslql qdpwghetke apgpvhlrer rqvvgdddfe dpdytyntdp |
| 61 | pellknvtnt vaahpelptt vvmlerdsts agtseratek iattdptapg tggtavgmls |
| 121 | tdsatqwslt svetvqpast evetsqpapm eaetsqpapm eaetsqpapm eaetsqpapm |
| 181 | eadtsqpapm eadtskpapt eaetskpapt eaetsqpapn eaetskpapt eaetskpapt |
| 241 | eaettqlpri qavktlftts aatevpstep ttmetastes nestiflgps vthlpdsglk |
| 301 | kglivtpgns paptlpgssd lipvkqclli ililaslati flvctvvlav rlsrkthmyp |
| 361 | vrnysptemi cissllpegg dgapvtangg lpkvqdlkte psgdrdgddl tlhsflp |

SEQ ID NO: 43 Human AIF1 Transcript Variant 1 cDNA Sequence (NM_032955.2;
CDS: 113-394)

| | |
|---|---|
| 1 | cgttgtctcc tccacctagc agttggttgg caaccccttc ctcagtcccc tgctgaaaac |
| 61 | cctccagtca gcgcttatcc cttctgctct ctcccctcac ccagagaaat acatggagtt |
| 121 | tgaccttaat ggaaatggcg atattgatat catgtccctg aaacgaatgc tggagaaact |
| 181 | tggagtcccc aagactcacc tagagctaaa gaaattaatt ggagaggtgt ccagtggctc |
| 241 | cggggagacg ttcagctacc ctgactttct caggatgatg ctgggcaaga gatctgccat |
| 301 | cctaaaaatg atcctgatgt atgaggaaaa agcgagagaa aaggaaaagc caacaggccc |
| 361 | cccagccaag aaagctatct ctgagttgcc ctgatttgaa gggaaaaggg atgatgggat |
| 421 | tgaaggggct tctaatgacc cagatatgga aacagaagac aaaattgtaa gccagagtca |
| 481 | acaaattaaa taaattaccc cctcctccag atcaagtca |

SEQ ID NO: 44 Human AIF1 Transcript Variant 4 cDNA Sequence
(NM_001318970.1; CDS: 223-504)

| | |
|---|---|
| 1 | aggggaaagg ggaagtttgg gaggaaggct tgtgagaaga ctggtgggag agaaggagag |
| 61 | cctgcagaca gaggcctcca gcttggagga aaagctttcg gactgctgaa ggccgagcag |
| 121 | gaagagaggc tggatgagat caacaagcaa ttcctagacg atcccaaata tagcagtgat |
| 181 | gaggatctgc cctccaaact ggaaggcttc aaagagaaat acatggagtt tgaccttaat |
| 241 | ggaaatggcg atattgatat catgtccctg aaacgaatgc tggagaaact tggagtcccc |
| 301 | aagactcacc tagagctaaa gaaattaatt ggagaggtgt ccagtggctc cggggagacg |
| 361 | ttcagctacc ctgactttct gaggatgatg ctgggcaaga gatctgccat cctaaaaatg |
| 421 | atcctgatgt atgaggaaaa agcgagagaa aaggaaaagc caacaggccc cccagccaag |
| 481 | aaagctatct ctgagttgcc ctgatttgaa gggaaaaggg atgatgggat tgaaggggct |
| 541 | tctaatgacc cagatatgga aacagaagac aaaattgtaa gccagagtca acaaattaaa |
| 601 | taaattaccc cctcctccag atcaagtca |

SEQ ID NO: 45 Human AIF1 Isoform 1 Amino Acid Sequence (NP_001305899.1
and NP_116573.1)

| | |
|---|---|
| 1 | mefdlngngd idimslkrml eklgvpkthl elkkligevs sgsgetfsyp dflrmmlgkr |
| 61 | sailkmilmy eekarekekp tgppakkais elp |

SEQ ID NO: 46 Human AIF1 Transcript Variant 3 Sequence (NM_001623.4; CDS:
122-565)

| | |
|---|---|
| 1 | aggggaaagg ggaagtttgg gaggaaggct tctgagaaga ctggtgggag agaaggagag |
| 61 | cctgcagaca gaggcctcca gcttggtctg tctccccacc tctaccagca tctgctgagc |
| 121 | tatgagccaa accagggatt tacagggagg aaaagctttc ggactgctga aggcccagca |
| 181 | ggaagagagg ctggatgaga tcaacaagca attcctagac gatcccaaat atagcagtga |
| 241 | tgaggatctg ccctccaaac tggaaggctt caaagagaaa tacatggagt ttgaccttaa |
| 301 | tggaaatggc gatattgata tcatgtctgt gaaacgaatg ctggagaaac ttggagtccc |
| 361 | caagactcac ctagagctaa agaaattaat tggagaggtg tccagtggct ccggggagac |
| 421 | gttcagctac cctgactttc tcaggatgat gctgggcaag agatctgcca tcctaaaaat |
| 481 | gatcctgatg tatgaggaaa aagcgagaga aaaggaaaag ccaacaggcc ccccagccaa |
| 541 | gaaagctatc tctgagttgc cctgatttga agggaaaagg gatgatggga ttgaaggggc |
| 601 | ttctaatgac ccagatatgg aaacagaaga caaaattgta agccagagtc aacaaattaa |
| 661 | ataaattacc ccctcctcca gatcaagtca |

SEQ ID NO: 47 Human AIF1 Isoform 3 Amino Acid Sequence (NP_001614.3)

| | |
|---|---|
| 1 | msqtrdlqgg kafgllkaqq eerldeinkq flddpkyssd edlpsklegf kekymefdln |
| 61 | gngdidimsl krmleklgvp kthlelkkli gevssgsget fsypdflrmm lgkrsailkm |
| 121 | ilmyeekare kekptgppak kaiselp |

SEQ ID NO: 48 Mouse AIF1 Transcript Variant 1 cDNA Sequence
(NM_001361501.1; CDS: 369-812)

| | |
|---|---|
| 1 | atcctattgt ttccctgtca ggctcctcca aggcccaaac taactggagc cagacgaacc |
| 61 | ctctgatgtg gtctgcacag ggcgctaggc tcagctcacc ccattcctgg agcagcctgc |
| 121 | agacttcatc ctctctcttc catcccgggg aaagtcagcc agtcctcctc agctgcctgt |
| 181 | cttaacctgc atcatgaagc ctgaggagat ttcaacagaa gctgatgtgg aagtgatgcc |
| 241 | tgggagttag caagggaatg agtggaaagg ggaagtgtga gaacggtccc agaagagact |
| 301 | ggggagctgg tggagagagg acccagcgga cagactgcca gcctaagaca accagcgtct |
| 361 | gaggagccat gagccaaagc agggatttgc agggaggaaa agcttttgga ctgctgaagg |
| 421 | cccagcagga agagaggctg gaggggatca acaagcaatt cctcgatgat cccaaataca |
| 481 | gcaatgatga ggatctgccg tccaaacttg aagccttcaa ggtgaagtac atggagtttg |
| 541 | atctgaatgg aaatggagat atcgatatta tgtccttgaa gcgaatgptg gagaaacttg |
| 601 | gggttcccaa gacccdccta gagctgaaga gattaattag agaggtgtcc agtggptccg |
| 661 | aggagacgtt cagctactct gactttctca gaatgatgct gggcaagaga tctgccatct |
| 721 | tgagaatgat tctgatgtat gaggagaaaa acaaagaaca caagaggcca actggtcccc |
| 781 | cagccaagaa agctatctcc gagctgccct gattggaggt ggatgtcaca cggtggggct |
| 841 | gagtgaggag cttctgatga cagcagcatg gaaaaaagaa acagtcgtga gpcagagtca |
| 901 | gactaaataa atgacgctcc tagtgggtca catca |

SEQ ID NO: 49 Mouse AIF1 Transcript Variant 2 cDNA Sequence (NM_019467.3;
CDS: 366-809)

| | |
|---|---|
| 1 | atcctattgt ttccctgtca ggctcctcca aggcccaaac taactggagc cagacgaacc |
| 61 | ctctgatgtg gtctgcacag ggcgctaggc tcagctcacc ccattcctgg agcagcctgc |
| 121 | agacttcatc ctctctcttc catcccgggg aaagtcagcc agtcctcctc agctgcctgt |
| 181 | cttaacctgc atcatgaagc ctgaggagat ttcaaaagct gatgtggaag tgatgcctgg |
| 241 | gagttagcaa gggaatgagt ggaaagggga agtgtgagaa cggtcccaga agagactggg |
| 301 | gagctggtgg agagaggacc cagcggacag actgccagcc taagacaacc agcgtctgag |
| 361 | gagccatgag ccaaagcagg gatttgcagg gaggaaaagc ttttggactg ctgaaggccc |
| 421 | agcaggaaga gaggctggag gggatcaaca agcaattcct cgatgatccc aaatacagca |
| 481 | atgatgagga tctgccgtcc aaacttgaag ccttcaaggt gaagtacatg gagtttgatc |
| 541 | tgaatggaaa tggagatatc gatattatgt ccttgaagcg aatgctggag aaacttgggg |
| 601 | ttcccaagac ccacctagag ctgaagagat taattagaga ggtgtccagt ggctccgagg |
| 661 | agacgttcag ctactctgac tttctcagaa tgatgctggg caagagatct gccatcttga |
| 721 | gaatgattct gatgtatgag gagaaaaaca aagaacacaa gaggccaact ggtcccccag |
| 781 | ccaagaaagc tatctccgag ctgccctgat tggaggtgga tgtcacacgg tggggctgag |
| 841 | tgaggagctt ctgatgacag cagcatggaa aaaagaaaca gtcgtgagcc agagtcagac |
| 901 | taaataaatg acgctcctag tgggtcacat caaaaaaaaa aaaaaaaa |

SEQ ID NO: 50 Mouse AIF1 Isoform A Amino Acid Sequence (NP_001348430.1
and NP_062340.1)

| | |
|---|---|
| 1 | msqsrdlqgg kafgllkaqq eerleginkq flddpkysnd edlpskleaf kvkymefdln |
| 61 | gngdidimsl krmleklgvp kthlelkrli revssgseet fsysdflrmm lgkrsaiilm |
| 121 | ilmyeeknke hkrptgppak kaiselp |

SEQ ID NO: 51 Mouse AIF1 Transcript Variant 3 cDNA Sequence
(NM_001361502.1; CDS: 194-634)

| | |
|---|---|
| 1 | atcctattgt ttccctgtca ggctcctcca aggcccaaac taactggagc cagacgaacc |
| 61 | ctctgatgtg gtctgcacag ggcgctaggc tcagctcacc ccattcctgg agcagcctgc |
| 121 | agacttcatc ctctctcttc catcpcgggg aaagtcagcc agtcptcctc agctgcctgt |
| 181 | cttaacctgc atcatgaagc ctgaggagat ttcaagagga aaagcttttg gactgctgaa |
| 241 | ggcccagcag gaagagaggc tggaggggat caacaagcaa ttcctcgatg atcccaaata |
| 301 | cagcaatgat gaggatctgc cgtccaaact tgaagccttc aaggtgaagt acatggagtt |
| 361 | tgatctgaat ggaaatggag atatcgatat tatgtccttg aagcgaatgc tggagaaact |
| 421 | tggggttccc aagacccacc tagagctgaa gagattaatt agagaggtgt ccagtggctc |
| 481 | cgaggagacg ttcagctact ctgactttct cagaatgatg ctgggcaaga gatctgccat |
| 541 | cttgagaatg attctgatgt atgaggagaa aaacaaagaa cacaagaggc caactggtcc |
| 601 | cccagccaag aaagctatct ccgagctgcc ctgattggag gtggatgtca cacggtgggg |
| 661 | ctgagtgagg agcttctgat gacagcagca tggaaaaaag aaacagtcgt gagccagagt |
| 721 | cagactaaat aaatgacgct cctagtgggt cacatca |

SEQ ID NO: 52 Mouse AIF1 Isoform B Amino Acid Sequence (NP_001348431.1)

| | |
|---|---|
| 1 | mkpeeisrgk afgllkaqqe erleginkqf lddpkysnde dlpskleafk vkymefdlng |
| 61 | ngdidimslk rmleklgvpk thlelkrlir evssgseetf sysdflrmml gkrsailrmi |
| 121 | lmyeeknkeh krptgppakk aiselp |

SEQ ID NO: 53 Human CD84 Transcript Variant 1 cDNA Sequence
(NM_001184879.1; CDS: 80-1117)

| | |
|---|---|
| 1 | ggaggaagaa aactcaagtg aaactgactc tgctagaaca gtgccgtgct tttccacaga |
| 61 | aggttagacc ctgaaagaga tggctcagca ccacctatgg atcttgctcc tttgcctgca |
| 121 | aacctggccg gaagcagctg gaaaagactc agaaatcttc acagtgaatg ggattctggg |
| 181 | agagtcagtc actttccctg taaatatcca agaaccacgg caagttaaaa tcattgcttg |
| 241 | gacttctaaa acatctgttg cttatgtaac accaggagac tcagaaacag cacccgtagt |
| 301 | tactgtgacc cacagaaatt attatgaacg gatacatgcc ttaggtccga actacaatct |
| 361 | ggtcattagc gatctgagga tggaagacgc aggagactac aaagcagaca taaatacaca |
| 421 | ggctgatccc tacaccacca ccaagcgcta caacctgcaa atctatcgtc ggcttgggaa |
| 481 | accaaaaatt acacagagtt taatggcatc tgtgaacagc acctgtaatg tcacactgac |
| 541 | atgctctgta gagaaagaag aaaagaatgt gacatacaat tggagtcccc tgggagaaga |
| 601 | gggtaatgtc cttcaaatct tccagactcc tgaggaccaa gagctgactt acacgtgtac |
| 661 | agcccagaac cctgtcagca acaattctga ctccatctct gcccggcagc tctgtgcaga |
| 721 | catcgcaatg ggcttccgta ctcaccacac cgggttgctg agcgtgctgg ctatgttctt |
| 781 | tctgcttgtt ctcattctgt cttcagtgtt tttgttccgt ttgttcaaga gaagacaagg |
| 841 | taggattttc ccagaaggtt cctgcttgaa caccttcact aagaaccctt atgctgcctc |
| 901 | aaagaaaacc atatacacat atatcatggc ttcaaggaac acccagccag cagagtccag |
| 961 | aatctatgat gaaatcctgc agtccaaggt gcttccctcc aaggaagagc cagtgaacac |
| 1021 | agtttattcc gaagtgcagt ttgctgataa gatggggaaa gccagcacac aggacagtaa |
| 1081 | acctcctggg acttcaagct atgaaattgt gatctaggct gctgggctga attctccctc |
| 1141 | tggaaactga gttacaacca ccaatactgg caggttccct ggatccagat cttctctgcc |
| 1201 | caactcttac tgggagattg caaactgcca catctcagcc tgtaagcaaa gcaggaaacc |
| 1261 | ttctgctggg catagcttgt gcctaaatgg acaaatggat gcataccctt cctgaaatga |
| 1321 | ctcccttctg aatgaatgac aaagcaggtt acctagtata gttttcccaa acttcttccc |
| 1381 | atcatagcac atgtagaaaa taatattttt atggcacact gggataaaca agcaagattg |
| 1441 | ctcacttctg gaagctgcat atgactagag gcctcttgtg actggaggta acaaccctgc |
| 1501 | ccagtaactg tgggagaagg ggatcaatat tttgcacacc tgtaataggc catggcacac |
| 1561 | cagccaagat gctctgctca cagtcagtat gtgtgaagat ccctggtgcg tggccttcac |
| 1621 | cacgcatctt gagcaaatta ggaaaatgta cccttcgctt gaggcagatg cagcccttcc |
| 1681 | cccgagtgca tggcttggag agcagaatgt gggctgcata taagcacact catccctttg |
| 1741 | tctgggaatc tttgtgcagg gcataacagg cttagtaagt ccaaacacag atgacagtgc |
| 1801 | tgtagtgggt tctgtcagag ttgtggctct cagccatgta gacacactct ccaaatggag |
| 1861 | tgttggaaaa tgttctttct gcagggtcta gagactgctg ggacactttt cttggagtgc |
| 1921 | tacttcagaa gccttatagg attttctttc tggccaagat ttccttctgt atcactccaa |
| 1981 | gcagcctcag cagaagaagc agccatgccc agtattccca ctctccaaaa ggaactgacc |
| 2041 | agcttatatt tctcacactt ctggggaact gggtataatc caaccatcaa aatagaagac |
| 2101 | cttgcaagaa gcagagtcat tctccagaag gaacttggga gatgatggtg cagatgatga |
| 2161 | aactgggttc atcccagttc caaagactca gagaactaga gtttaagctg aggcagagtg |
| 2221 | ccgccaccct ggcatgcccc acaaacagat caccagccag cttacacagg cattaactct |
| 2281 | cctcaatgag gaagaatcat tcacaactga gcaagacatt catatgatca tttaaggaag |
| 2341 | tgtttccctt atgtgttagc aagtataatc ggctaactcc taaatcccaa tgaatagtcc |
| 2401 | taggctggac agcaatgggc tgcaattagg cagataaaga catcagtccc agtaaatgaa |
| 2461 | tccatagact catctagcac caactaccat tagcactatg ttaggagctg caaggcccca |
| 2521 | aagtagaaga tgtgcataat gtctgctctt gtgtagctca ggagacaatt caaggcccca |
| 2581 | cactacagtt aacgctgaac tgcagctgca agtaatagca tgaacagtca gaaaaatacc |
| 2641 | ttatgagggg gcagggctga agctgggcct tgaaggatgg atgaaatttg gatagagaat |
| 2701 | gaggaagaca gagggcctcc aagtgagaga agcatgaaaa atgagcaggg gcctggatca |
| 2761 | gtggggtgta ttcagagcac ctctccagat gcaccatgca tgctcacagt cccttgccta |
| 2821 | tgtgtggcag agtgtcccag ccagatgtgt tccctcaccc catgttcatt tacatgtcct |
| 2881 | tcaatgccca cctcaaaagg tacctcttct gtaaagcttt ccctggtatc aggaatcaaa |
| 2941 | attaatcagg gatcttttca cactgctgtt ttttcctctt tggtccttct atcactaaaa |
| 3001 | ctcatctcat tcagccttac agcataacta attatttgtt ttcctcacta cattgtacat |
| 3061 | gtgggaatta cagataaacg gaagccggct ggggtggtgg ctcacgcctg taatcccaac |
| 3121 | actttgggag gccaaggcag gcggatcacc tgaggtcagg agttcgagat tagtctggcc |
| 3181 | aacatggtga aaccccatct ctactaaaaa tacgaaatta gccaggtgtg gtggcacaca |
| 3241 | tctgtagtcc cagctactct ggaggctgag acaggagaat cgcttgaacc caggaagtgg |
| 3301 | aggttgcagt gagctgagat cacaccactg cactccagcc tgggagagac agagtgagac |
| 3361 | tccatctcga aaaaaaaaaa aagatagaag ccaataagca tggtgcaatc aaattctggc |
| 3421 | aagcattaaa tatcaggatg cagctgggca cggtggctca cgcctgtaat cccagcactt |
| 3481 | tgggaggcca aggtgggcgg atcacttgag gtcaggaatt tgagaggatc ctggccagca |
| 3541 | tggcaaaacc ccatctgtac ttaaaataca aaaaaattag ctgggcgtgg tggtgcacac |
| 3601 | ctgtaatccc agctacttgg gaggctgagg tgggagaatt gcttgaacct gggaggtgga |
| 3661 | ggttgcagtg agctgagatc ctgccactgc actccaggct gggcaacaga gtgagaccat |
| 3721 | gtctcaaaaa ataaaaataa aataaaataa tatcaggatg catacatcag aggctgttcc |
| 3781 | tagtgtaaag gcactttgga gggagaagac tttcagagtt aggcagacca actaagaggt |
| 3841 | cagctgaagc acctaaccag ttgtaaggag gtgaaagaca gcaccccaag aagagacgtg |
| 3901 | caggaaggag gaaagaggct tggtcataaa ggatggagga attccaaagt gacactgaac |
| 3961 | aggctgcgtt tatcctaaaa taaaaccact cctcactctg tggatgcgtt ccagactcat |
| 4021 | tcccaaacat ctttattctc taacttgccc tcttcctctt cctaatatgc tcactcaagt |
| 4081 | aaaattacta gtgtcctaat gcccctatgc atattgtcaa aaataaaaat cagaagcagg |
| 4141 | ttagatctgt taggtcttcc agaagagcaa acctgggatg aagccagagc ccaggaattc |
| 4201 | tccaggtagc ctttggactc aggacaccct actcttgtct ctcctatcag tttctctgct |
| 4261 | atgaatctcc tgattcatga acacgttatc tgttcaccct tctctctagg tcttagttct |
| 4321 | tagattttcc ttctgtaaaa tgcatgtgat cttattttcc cctccacaac tttccagatg |
| 4381 | aactagactg tgaccaagag gtctataaaa tcaaagcatc atggaacagg atcttgtatc |
| 4441 | agaccaaagt gtgccagttt ttaaaaatgt gcatcaaaat ggaagtctca gagacagagc |
| 4501 | cctctggtgg aaagttctag taggttagga cagtcctgcc tgcagacacc ttgggcttta |
| 4561 | ctgagggact caactgagaa aatgaggaat gttgcagctc atgattctta gaagaagaaa |
| 4621 | gtgaagcttg tttaaaatat gatttaaaaa atctgtagaa cactgtaaac tacacaggct |
| 4681 | atgagggaat agcctggttg ggccagcttg gaaatcgggc acaggcagga aggggcctgt |
| 4741 | ctggtttggg ccgtgtccac agagagcact tattaggtcc tgcctggaga gaaggaatgg |
| 4801 | ctgggctata ttttcttcca gactcattat ttttcttctg tttgactttt ctctgaattt |
| 4861 | cccttgattt gtataaattt tctcaataat tagtgacagt gtctactgat tgtaaaatga |
| 4921 | agcttgaagg ccaggcgcag tggctcatgc ctgtaatcct agaattttgg gaggccaagg |
| 4981 | tgggtggatc acaaggagtt cgagaccagc ctggccaagg ttgtgaaacc gcgtctctac |
| 5041 | taaaaataca aaaaaattag ccgggcatgg tggcacgtgc ctgtagtccc agctactcag |
| 5101 | gaagctgagg caacagaatc acttgaacct gggaggtgga ggttgcagtg agccgagatc |
| 5161 | acgccactgc actccagcct gggcgagaga gtgagactcc gtctcaaaaa aaaaaaaaaa |
| 5221 | aaaaaaagtt tgaagaacaa agacaataag aggaaatata atgagtggtc ataaatgtgg |
| 5281 | gctctgacag tagagtgcct gggtctgcat cctggtttct tagtcatgtg accttaggca |
| 5341 | agttacttta acctcgctgt acctcaggtt gtccatctgt aaaatgggga taataatagt |
| 5401 | gcctaccttt taaggttgat gtggggatta aatgaggtgt tgctcataca ggaatgtgcc |
| 5461 | tgtgcatggc aaagttcggg aaatttttta taagctgttc taggcctgaa atcttcagaa |
| 5521 | gatgctaatc taaattcatg aaataagctt cttacaacag aaatgctgct agtattatgc |
| 5581 | aaaattaatg ttgtatatca aacttttaac tctcatccct ccttattcag atatattttg |
| 5641 | ttataagcaa tgtttgttcc cctcgttatt ataccacagt ctacttacct gatgctatat |
| 5701 | ctgcctcccc agttagactg agagaacagg ggatatacct aaataataat aataataata |
| 5761 | ataataataa ataataatgg agagctcctt gaagataggg agcctgtaag aatcattgag |
| 5821 | ggcttatttt gtataccaac tgctaaacta gatgcttcat acattgttgt caatactcat |
| 5881 | gacagccttg taaagtagaa attaattctt ccagttaaca ctaaggctga catatgaata |
| 5941 | ccttggcaaa tctggaaagc tgggaagaca gtatttgaat tcaagacttc ttgtcaccaa |
| 6001 | gggccatgca cttgtactct gccatgtggc ccttttttac ctcctgtgga ttctccctac |
| 6061 | ctggtacttg gccttaggtg tacacacacc tggcactttg cttgacacat aataggtgga |
| 6121 | ccacaaatat ctactaaatg aatatttgca tatagtaata ttttaaggta ctaaaagcag |
| 6181 | ctcaaagtaa atatattaat atattaattc cattgctatc tggataacca ctcaactttc |
| 6241 | ctgctgaaaa tgcccattta attaaagaag gttggataga gctctctata tgcattttgg |
| 6301 | acaggcaggg gtttcaggtc ataaacdttc tgatgagtta atataaaata agagaaactg |
| 6361 | taaatttcca ctactaaaaa tcacaaaaat aacagaaaca aaagaagaga taagaatttg |
| 6421 | gggaattgtg ctgaacaatt tagtggttaa aaaaaacaac tgtgcatgtt tagacttaaa |
| 6481 | taagccccca tccaagtgtg aggggtccag taatttttca aaacatatga aagtgttaat |
| 6541 | acatttcgac aaaggaccat taaaaaagtc ctgaattctg acttgaggga ggaaagtaat |
| 6601 | gactaataca ttctctagag acttgcagac tttgggaatt cataaaggaa tggatgataa |
| 6661 | ttattaactg ttgctggctg attgcccaga cagttctcaa cagccctgta caagtctctg |
| 6721 | ggtttgggat ggatcaattc tgagactgga aaatggccaa atctttgcaa atgagaaata |
| 6781 | tttttcttat aagttcttat tgtaggcaaa taattacata gattattcat cagagaattt |
| 6841 | ttaaatgctc ataatctcaa ctctttcatt tacaacttgt atttccaata gtttatgggt |
| 6901 | catctctgca tagatgtcag aagtcacctc aagtttagcg tgtccaaaat ctaactcaca |
| 6961 | ggtctgtttc tgacctccca acttgctttc cttgtgtttt tcctatgcta atgatccacc |
| 7021 | ataatcaaaa taattaacat ttatccagtg cctactatgt actattccct gtcctgtttt |
| 7081 | acatttactc atttaaagtc cataagaaac attaaatctc atctgccttc tgaagaagat |
| 7141 | acaaccatgc tct ctttta aaagtaggaa actgggtcac agaaaggtga agtctttaag |
| 7201 | gctgaatcac agtagctcat cctagtaaat agaaaagcca ggattcaact ccaggggctg |
| 7261 | ggtgcagaac tgctattctt cactgcttca ccaatcagca gctacccaag gcagaaaact |
| 7321 | ttttcatcct tggctccttc attctccctg tcaccccaga tcccctctac atctagtcag |
| 7381 | agaaataggt ctgtcaattc caacttctct atatggctcc tctcaggcat gtgcccttaa |
| 7441 | ttggcctaat tctctaatac accttccctc tacatgctca ctccctcaga tcattgcttt |
| 7501 | atcacgtgtt acctgggttg ctattacata aagagcaatc tttctaaaat gaggatctta |
| 7561 | tcacttcact tccacactaa aatgtttttc ctggggaacc acactcctta gcaatctgac |
| 7621 | ccatcagacc ttccaggctg tctcctgcct gctccctaag gctccagcca cacagaatta |
| 7681 | tcatgggccc acacacccac caaatcctcc catgcctttg cccatgttgt ctgggatgcc |
| 7741 | cttctctccc ttctgtctac atcaagcatc agactgaata tccctcttgt gcggccttct |
| 7801 | aaaacctccc gtccaaagcg aaatatattg ccctctattt atacttttac agcatttggc |
| 7861 | acacaagtac agagtagtag ctttttatca cattctctga taattatata gatatggtat |
| 7921 | ttctatagct tctctccaac tggctaataa gttgcttttt gtctgagtgc ctaattttgt |
| 7981 | gttttgtgtc tgagtgcctc agttcctcaa aaaaaggttt tttgattagt tcattattca |
| 8041 | tttgaacatg gaaattatgc tcactagtgg caaatgccac taaccgtatt ccagaagcta |
| 8101 | ggtgtcatgt ttgcaataag atatattatc ccttctacaa gtcacctttt atttcaggca |
| 8161 | tttgtaaatg cccattaata aagtatggtt cataaatttt accttgtaag tgcctaagaa |
| 8221 | atgagactac aagctccatt tcagcaggac acaataaata ttattttata atgcatctaa |
| 8281 | aaaaaaaaaa aaaaaa |

SEQ ID NO: 54 Human CD84 Isoform 1 Amino Acid Sequence (NP_001171808.1)

| | |
|---|---|
| 1 | maqhhlwill lclqtwpeaa gkdseiftvn gilgesvtfp vniqeprqvk iiawtsktsv |
| 61 | ayvtpqdset apvvtvthrn yyerihalgp nynivisdlr medagdykad intqadpytt |
| 121 | tkrynlqiyr rlgkpkitqs lmasvnstcn vtltcsveke eknvtynwsp lgeegnvlqi |
| 181 | fqtpedqelt ytctaqnpvs nnsdsisarq lcadiamgfr thhtgllsvl amffllvlil |
| 241 | ssvflfrlfk rrqgrifpeg sclntftknp yaaskktiyt yimasrntqp aesriydeil |
| 301 | qskvlpskee pvntvysevq fadkmgkast qdskppgtss yeivi |

SEQ ID NO: 55 Human CD84 Transcript Variant 2 cDNA Sequence (NM_003874.3;
CDS: 80-1066)

| | |
|---|---|
| 1 | ggaggaagaa aactcaagtg aaactgactc tgctagaaca gtgccgtgct tttccacaga |
| 61 | aggttagacc ctgaaagaga tggctcagca ccacctatgg atcttgctcc tttgcctgca |
| 121 | aacctggccg gaagcagctg gaaaagactc agaaatcttc acagtgaatg ggattctggg |
| 181 | agagtcagtc actttccctg taaatatcca agaaccacgg caagttaaaa tcattgcttg |
| 241 | gacttctaaa acatctgttg cttatgtaac accaggagac tcagaaacag cacccgtagt |
| 301 | tactgtgacc cacagaaatt attatgaacg gatacatgcc ttaggtccga actacaatct |
| 361 | ggtcattagc gatctgagga tggaagacgc aggagactac aaagcagaca taaatacaca |
| 421 | ggctgatccc tacaccacca ccaagcgcta caacctgcaa atctatcgtc ggcttgggaa |
| 481 | accaaaaatt acacagagtt taatggcatc tgtgaacagc acctgtaatg tcacactgac |
| 541 | atgctctgta gagaaagaag aaaagaatgt gacatacaat tggagtcccc tgggagaaga |
| 601 | gggtaatgtc cttcaaatct tccagactcc tgaggaccaa gagctgactt acacgtgtac |
| 661 | agcccagaac cctgtcagca acaattctga ctccatctct gcccggcagc tctgtgcaga |
| 721 | catcgcaatg ggcttccgta ctcaccacac cgggttgctg agcgtgctgg ctatgttctt |
| 781 | tctgcttgtt ctcattctgt cttcagtgtt tttgttccgt ttgttcaaga gaagacaaga |
| 841 | tgctgcctca aagaaaacca tatacacata tatcatggct tcaaggaaca cccagccagc |
| 901 | agagtccaga atctatgatg aaatcctgca gtccaaggtg cttccctcca aggaagagcc |
| 961 | agtgaacaca gtttattccg aagtgcagtt tgctgataag atggggaaag ccagcacaca |
| 1021 | ggacagtaaa cctcctggga cttcaagcta tgaaattgtg atctaggctg ctgggctgaa |
| 1081 | ttctccctct ggaaactgag ttacaaccac caatactggc aggttccctg gatccagatc |
| 1141 | ttctctgccc aactcttact gggagattgc aaactgccac atctcagcct gtaagcaaag |
| 1201 | caggaaacct tctgctgggc atagcttgtg cctaaatgga caaatggatg catacccttc |
| 1261 | ctgaaatgac tccctatctg atgaatgaca aagcaggtta cctagtatag ttttcccaaa |
| 1321 | cttcttccca taatagcaca tgtagaaaat aatattttta tggcacactg ggataaacaa |
| 1381 | gcaagattgc taacttctgg aagctgcata tgactagagg cctcttgtga ctggaggtaa |
| 1441 | caaccctgcc cagtaactgt gggagaaggg gatcaatatt ttgcacacct gtaataggcc |
| 1501 | atggcacacc agccaagatg ctctgctcac agtcagtatg tgtgaagatc cctggtgcgt |
| 1561 | ggccttcacc acgcatcttg agcaaattag gaaaatgtac cacttcgctt aggcagatgc |
| 1621 | agcccttccc ccgagtgcat ggcttggaga gcagaatgtg ggctgcatat aagcacactc |
| 1681 | atccctttgt ctgggaatct ttgtgcaggg cataacaggc ttagtaagtc caaacacaga |
| 1741 | tgacagtgct gtgtgggtct ctgtcagagt tgtggctctc agccatgtag acacactctc |
| 1801 | caaatggagt gttggaaaat gttctttctg cagggtctag agactgctgg gacacttttc |
| 1861 | ttggagtgct acttcagaag ccttatagga ttttctttct ggccaagatt tccttctgta |
| 1921 | tcactccaag cagcctcagc agaaccagca gccatgccca gtattcccac tctccaaaag |
| 1981 | gaactgacca gcttatattt ctcacacttc tggggaactg ggtataatcc aaccatcaaa |
| 2041 | atagaagacc ttgcaagaag cagagtcatt ctccagaagg aacttgggag atgatggtgc |
| 2101 | agatgatgaa actgggttca tcccagttcc aaagactcag agaactagag tttaagctga |
| 2161 | ggcagagtgc cgccaccctg gcatgcccca caaacagatc accagccagc ttacacaggc |
| 2221 | attaactctc ctcaatgagg aagaatcatt cacaactgag caagacattc atatgatcat |
| 2281 | ttaaggaagt gtttccctta tgtgttagca agtataatcg gctaactcct aaatcccaat |
| 2341 | gaatagtcct aggctggaca gcaatgggct gcaattaggc agataaagac atcagtccca |
| 2401 | gtaaatgaat ccatagactc atctagcacc aactaccatt agcactatgt taggagctgc |
| 2461 | aaggccccaa agtagaagat gtgcataatg tctgctcttg tgtagctcag gagacaattc |
| 2521 | cagcacagac actacagtta acgctgaact gcagctgcaa gtaatagcat gaacagtcag |
| 2581 | aaaaatacct tatgaggggg cagggctgaa gctgggcctt gaaggatgga tgaaatttgg |
| 2641 | atagagaatg aggaagacag agggcctcca agtgagagaa gcatgaaaaa tgagcagggg |
| 2701 | cctggatcag tggggtgtat tcagagcacc tctccagatg caccatgcat gctcacagtc |
| 2761 | ccttgcctat gtgtggcaga gtgtcccagc cagatgtgtg ccctcacccc atgtccattt |
| 2821 | acatgtcctt caatgcccac ctcaaaaggt acctcttctg taaagctttc cctggtatca |
| 2881 | ggaatcaaaa ttaatcaggg atcttttcac actgctgttt tttcctcttt ggtccttcta |
| 2941 | tcactaaaac tcatctcatt cagccttaca gcataactaa ttatttgttt tcctcactac |
| 3001 | attgtacatg tgggaattac agataaacgg aagccggctg gggtggtggc tcacgcctgt |
| 3061 | aatcccaaca ctttgggagg ccaaggcagg cggatcacct gaggtcagga gttcgagatt |
| 3121 | agtctggcca acatggtgaa accccatctc tactaaaaat acgaaattag ccaggtgtgg |
| 3181 | tggcacacat ctgtagtccc agctactctg gaggctgaga caggagaatc gcttgaaccc |
| 3241 | aggaagtgga ggttgcagtg agctgagatc acaccactgc actccagcct gggagagaca |
| 3301 | gagtgagact ccatctcgaa aaaaaaaaaa agatagaagc caataagcat ggtgcaatca |
| 3361 | aattctggca agcattaaat atcaggatgc agctgggcac ggtggctcac gcctgtaatc |
| 3421 | ccagcacttt gggaggccaa ggtgggcgga tcacttgagg tcaggaattt gagaggatcc |
| 3481 | tggccagcat ggcaaaaccc catctgtact taaaatacaa aaaaattagc tgggcgtggt |
| 3541 | ggtgcacacc tgtaatccca gctacttggg aggctgaggt gggagaattg cttgaacctg |
| 3601 | ggaggtggag gttgcagtga gctgagatcc tgccactgca ctccaggctg ggcaacagag |
| 3661 | tgagaccatg tctcaaaaaa taaaaataaa ataaaataat atcaggatgc atacatcaga |
| 3721 | ggctgttcct agtgtaaagg cactttggag ggagaagact ttcagagtta ggcagaccaa |
| 3781 | ctaagaggtc agctgaagca cctaaccagt tgtaaggagg tgaaagacag caccccaaga |
| 3841 | agagacgtgc aggaaggagg aaagaggctt ggtcataaag gatggaggaa ttccaaagtg |
| 3901 | acactgaaca ggctgcgttt atcctaaaat aaaaccactc ctcactctgt ggatgcgttg |
| 3961 | aagactcatt cccaaacatc tttattctct aacttgccct cttcctcttc ctaatatgct |
| 4021 | cactcaagta aaattactag tgtcctaatg cccctatgca tattgtcaaa aataaaaatc |
| 4081 | agaagcaggt tagatctgtt aggtcttcca gaagagcaaa cctgggatga agccagagcc |
| 4141 | caggaattct gaaggtagcc tttggactca ggacacccta ctcttgtctc tcctctcagt |
| 4201 | ttctctgcta tgaatctcct gattcatgaa cacgttatct gttcaccctt ctctctaggt |
| 4261 | cttagttctt agattttcct tctgtaaaat gcatgtgatc ttattttccc ctccacaact |
| 4321 | ttccagatga actagactgt gaccaagagg tctataaaat caaagcatca tggaacagga |
| 4381 | tcttgtatca gaccaaagtg tgccagtttt taaaaatgtg catcaaaatg gaagtctcag |
| 4441 | agacagagcc ctctggtgga aagttctagt aggttaggac agtcctgcct gcagacacct |
| 4501 | tgggctttac tgagggactc aactgagaaa atgaggaatg ttgcagctca tgattcttag |
| 4561 | aagaagaaag tgaagcttgt ttaaaatatg atttaaaaaa tctgtagaac actgtaaact |
| 4621 | acacaggcta tgagggaata gcctggttgg gccagcttgg aaatcgggca caggcdggaa |
| 4681 | ggggcctgtc tggtttgggc cgtgtccaca gagagcactt cttaggtcct gcctggagag |
| 4741 | aaggaatggc tgggctatat tttcttccag actcattatt tttcttctgt ttgacttttc |
| 4801 | tctgaatttc ccttgatttg tataaatttt ctcaataatt agtgacagtg tctactgatt |
| 4861 | gtaaaatgaa gcttgaaggc caggcgcagt ggctcatgcc tgtaatccta gaattttggg |
| 4921 | aggccaaggt gggtggatca caaggagttc gagaccagcc tggccaaggt tgtgaaaccg |
| 4981 | cgtctctact aaaaatacaa aaaaattagc cgggcatggt ggcacgtgcc tgtagtccca |
| 5041 | gctactcagg aagctgaggc aacagaatca cttgaacctg ggaggtggag gttgcagtga |
| 5101 | gccgagatca cgccactgca ctccagcctg ggcgagagag tgagactccg tctcaaaaaa |
| 5161 | aaaaaaaaaa aaaaaagttt gaagaacaaa gacaataaga ggaaatataa tgagtggtca |
| 5221 | taaatgtggg ctctgacagt agagtgcctg ggtctgcatc ctggtttctt agtcatgtga |
| 5281 | ccttaggcaa gttactttaa cctcgctgta cctcaggttg tccatctgta aaatggggat |
| 5341 | aataatagtg cctacctttt aaggttgatg tggggattaa atgaggtgtt gctcatacag |
| 5401 | gaatgtgcct gtgcatggca aagttcggga aattttttat aagctgttct aggcctgaaa |
| 5461 | tcttcagaag atgctaatct aaattcatga aataagcttc ttacaacaga aatgctgcta |
| 5521 | gtattatgca aaattaatgt tgtatatcaa acttttaact ctcatccctc cttattcaga |
| 5581 | tatattttgt tataagcaat gtttgttccc ctcgttatta taccacagtc tacttacctg |
| 5641 | atgctatatc tgcctcccca gttagactga gagaacaggg gatataccta aataataata |
| 5701 | ataataataa taatactaaa taataatgga gagctccttg aagataggga gcctgtaaga |
| 5761 | atcattgagg gcttattttg tatagcaact gctaaactag atgcttcata cattgttgtc |
| 5821 | aatactcatg acagccttgt aaagtagaaa ttaattcttc cagttaacac taaggctgac |
| 5881 | atatgaatac cttggcaaat ctggaaagct gggaagacag tatttgaatt caagacttct |
| 5941 | tgtcaccaag ggccatgcac ttgtactctg ccatgtggcc cttttttacc tcctgtggat |
| 6001 | tctccctacc tggtacttgg ccttaggtgt acacacacct ggcactttgc ttgacacata |
| 6061 | ataggtggac cacaaatatc tactaaatga atatttgcat atagtaatat tttaaggtac |
| 6121 | taaaagcagc tcaaagtaaa tatattaata tattaattcc attgctatct ggataaccac |
| 6181 | tcaactttcc tgctgaaaat gcccatttaa ttaaagaagg ttggatagag ctctctatat |
| 6241 | gcattttgga caggcagggg tttcaggtca taaacattct gatgagttaa tataaaataa |
| 6301 | gagaaactgt aaatttccac tactaaaaat cacaaaaata acagaaacaa aagaagagat |
| 6361 | aagaatttgg ggaattgtgc tgaacaattt agtggttaaa aaaaacaact gtgcatgttt |
| 6421 | agacttaaat aagcccccat ccaagtgtga ggggtccagt aatttttcaa aacatatgaa |
| 6481 | agtgttaata catttcgaca aaggaccatt aaaaaagtcc tgaattctga cttgagggag |
| 6541 | gaaagtaatg actaatacat tctctagaga cttgcagact ttgggaattc ataaaggaat |
| 6601 | ggatgataat tattaactgt tgctggctga ttgcccagac agttctcaac agccctgtac |
| 6661 | aagtctctgg gtttgggatg gatcaattct gagactggaa aatggccaaa tctttgcaaa |
| 6721 | tgagaaatat ttttcttata agttcttatt gtaggcaaat aattacatag attattcatc |
| 6781 | agagaatttt taaatgctca taatctcaac tctttcattt acaacttgta tttccaatag |
| 6841 | tttatgggtc atctctgcat agatgtcaga agtcacctca agtttagcgt gtccaaaatc |
| 6901 | taactcacag gtctgtttct gacctcccaa cttgctttcc ttgtgttttt cctatgctaa |
| 6961 | tgatccacca taatcaaaat aattaacatt tatccagtgc ctactatgta ctattccctg |
| 7021 | tcctgtttta catttactca tttaaagtcc ataagaaaca ttaaatctca tctgccttct |
| 7081 | gaagaagata caaccatgct ctcttttaca aagtaggaaa ctgggtcaca gaaaggtgaa |
| 7141 | gtctttaagg ctgaatcaca gtagctcatc ctagtaaata gaaaagccag gattcaactc |
| 7201 | caggggctgg gtgcagaact gctattcttc actgcttcac caatcagcag ctacccaagg |
| 7261 | cagaaaactt tttcatcatt ggctccttca ttctccctgt caccccagat cccctctaca |
| 7321 | tctagtcaga gaataggtcc tgtcaattcc aacttctcta tatggctcct ctcaggcatg |
| 7381 | tgcccttaat tggcctaatt ctctaatgca ccttccctct acatgctcac tccctcagat |
| 7441 | cattgcttta tcacgtgtta cctgggttgc tattacataa agagcaatct ttctaaaatg |
| 7501 | aggatcttat cacttcactt ccacactaaa atgtttttcc tggggaacca cactccttag |
| 7561 | caatctgacc catcagacct tccaggctgt ctcctgcctg ctccctaagg ctccagccac |
| 7621 | acagaattat catgggccca cacacccacc aaatcctccc atgcctttgc ccatgttgtc |
| 7681 | tgggatgccc ttctctccct tctgtctaca tcaagcatca gactgaatat ccctcttgtg |
| 7741 | cggccttcta aaacctcccg tccaaagcga aatatattgc cctctattta tacttttaca |
| 7801 | gcatttggca cacaagtaca gagtagtagc tttttatcac attctctgat aattatatag |
| 7861 | atatggtatt tcttagctct ctctccaact ggctaataag ttgctttttg tctgagtgcc |
| 7921 | taattttgtg ttttgtgtct gagtgcctca gttcctcaaa aaaaggtttt ttgattagtt |
| 7981 | cattattcat ttgaacatgg aaattatgct cactagtggc aaatgccact aaccgtattc |
| 8041 | cagaagctag gtgtcatgtt tgcaataaga tatattatcc cttctacaag tcacctttta |
| 8101 | tttcaggcat ttgtaaatgc ccattaataa agtatggttc ataaatttta ccttgtaagt |
| 8161 | gcctaagaaa tgagactaca agctccattt cagcaggaca caataaatat tattttataa |
| 8221 | tgcatctaaa aaaaaaaaaa aaaaa |

SEQ ID NO: 56 Human CD84 Isoform 2 Amino Acid Sequence (NP_003865.1)

| | |
|---|---|
| 1 | maqhhlwill lclqtwpeaa gkdseiftvn gilqesvtfp vniqeprqvk iiawtsktsv |
| 61 | ayvtpgdset apvvtvthrn yyerihalgp nynlvisdlr medagdykad intqadpytt |
| 121 | tkryniqiyr rlgkpkitqs lmasvnstcn vtltcsveke eknvtynwsp lgeegnvlqi |
| 181 | fqtpedqelt ytctaqnpvs nnsdsisarq lcadiamgfr thhtgllsvl amffllvlil |
| 241 | ssvflfrlfk rrqdaaskkt iytyimasrn tqpaesriyd eilqskvlps keepvntvys |
| 301 | evgfadkmgk astqdskppg tssyeivi |

SEQ ID NO: 57 Human CD84 Transcript Variant 3 cDNA Sequence
(NM_001184881.1; CDS: 80-898)

| | |
|---|---|
| 1 | ggaggaagaa aactcaagtg aaactgactc tgctagaaca gtgccgtgct tttccacaga |
| 61 | aggttagacc ctgaaagaga tggctcagca ccacctatgg atcttgctcc tttgcctgca |
| 121 | aacctggccg gaagcagctg gaaaagactc agaaatcttc acagtgaatg ggattctggg |
| 181 | agagtcagtc actttccctg taaatatcca agaaccacgg caagttaaaa tcattgcttg |
| 241 | gacttctaaa acatctgttg cttatgtaac accaggagac tcagaaacag cacccgtagt |
| 301 | tactgtgacc cacagaaatt attatgaacg gatacatgcc ttaggtccga actacaatct |
| 361 | ggtcattagc gatctgagga tggaagacgc aggagactac aaagcagaca taaatacaca |
| 421 | ggctgatccc tacaccacca ccaagcgcta caacctgcaa atctatcgtc ggcttgggaa |
| 481 | accaaaaatt acacagagtt taatggcatc tgtgaacagc acctgtaatg tcacactgac |
| 541 | atgctctgta gagaaagaag aaaagaatgt gacatacaat tggagtcccc tgggagaaga |
| 601 | gggtaatgtc cttcaaatct tccagactcc tgaggaccaa gagctgactt acacgtgtac |
| 661 | agcccagaac cctgtcagca acaattctga ctccatctct gcccggcagc tctgtgcaga |
| 721 | catcgcaatg ggcttccgta ctcaccacac cgggttgctg agcgtgctgg ctatgttctt |
| 781 | tctgcttgtt ctcattctgt cttcagtgtt tttgttccgt ttgttcaaga gaagacaagg |
| 841 | tgcttccctc caaggaagag ccagtgaaca cagtttattc cgaagtgcag tttgctgata |
| 901 | agatggggaa agccagcaca caggacagta aacctcctgg gacttcaagc tatgaaattg |
| 961 | tgatctaggc tgctgggctg aattctccct ctggaaactg agttacaacc accaatactg |
| 1021 | gcaggttccc tggatccaga tcttctctgc ccaactctta ctgggagatt gcaaactgcc |
| 1081 | acatctcagc ctgtaagcaa agcaggaaac cttctgctgg gcatagcttg tgcctaaatg |
| 1141 | gacaaatgga tgcataccct tcctgaaatg actcccttct gaatgaatga caaagcaggt |
| 1201 | tacctagtat agttttccca aacttcttcc catcatagca catgtagaaa ataatatttt |
| 1261 | tatggcacac tgggataaac aagcaagatt gctcacttct ggaagctgca tatgactaga |
| 1321 | ggcctcttgt gactggaggt aacaaccctg cccagtaact gtgggaccag gggatcaata |
| 1381 | ttttgcacac ctgtaatagg ccatggcaca ccagccaaga tgctctgctc acagtcagta |
| 1441 | tgtgtgaaga tccctggtgc gtggccttca ccacgcatct tgagcaaatt aggaaaatgt |
| 1501 | acccttcgct tgaggcagat gcagccactt ccccgagtgc atggcttgga gagcagaatg |
| 1561 | tgggctgcat ataagcacac tcatcccttt gtctgggaat ctttgtgcag ggcataacag |
| 1621 | gcttagtaag tccaaacaca gatgacagtg ctgtgtgggt ctctgtcaga gttgtggctc |
| 1681 | tcagccatgt agacacactc tccaaatgga gtgttggaaa atgttctttc tgcagggtct |
| 1741 | agagactgct gggacacttt tcttggagtg ctacttcaga agccttatag gattttcttt |
| 1801 | ctggccaaga tttccttctg tatcactcca agcagcctca gcagaagaag cagccatgcc |
| 1861 | cagtattccc actctccaaa aggaactgac cagcttatat ttctcacact tctggggaac |
| 1921 | tgggtataat ccaaccatca aaatagaaga ccttgcaaga agcagagtca ttctccagaa |
| 1981 | ggaacttggg agatgatggt gcagatgatg aaactgggtt catcccagtt ccaaagactc |
| 2041 | agagaactag agtttaagct gaggcagagt gccgccaccc tggcatgccc cacaaacaga |
| 2101 | tcaccagcca gcttacacag gcattaactc tcctcaatga ggaagaatca ttcacaactg |
| 2161 | agcaagacat tcatatgatc atttaaggaa gtgtttccct tatgtgttag caagtataat |
| 2221 | cggctaactc ctaaatccca atgaatagtc ctaggctgga cagcaatggg ctgcaattag |
| 2281 | gcagataaag acatcagtcc cagtaaatga atccatagac tcatctagca ccaactacca |
| 2341 | ttagcactat gttaggagct gcaaggcccc aaagtagaag atgtgcataa tgtctgctct |
| 2401 | tgtgtagctc aggagacaat tccagcacag acactacagt taacgctgaa ctgcagctgc |
| 2461 | aagtaatagc atgaacagtc agaaaaatac cttatgaggg ggcagggctg aagctgggcc |
| 2521 | ttgaaggatg gatgaaattt ggatagagaa tgaggaagac agagggcctc caagtgagag |
| 2581 | aagcatgaaa aatgagcagg ggcctggatc agtggggtgt attcagagca cctctccaga |
| 2641 | tgcaccatgc atgctcacag tcccttgcct atgtgtggca gagtgtccca gccagatgtg |
| 2701 | tgccctcacc ccatgtccat ttacatgtcc ttcaatgccc acctcaaaag gtacctcttc |
| 2761 | tgtaaagctt tccctggtat caggaatcaa aattaatcag ggatcttttc acactgctgt |
| 2821 | tttttcctct ttggtccttc tatcactaaa actcatctca ttcagcctta cagcataact |
| 2881 | aattatttgt tttcctcact acattgtaca tgtgggaatt acagataaac ggaagccggc |
| 2941 | tggggtggtg gctcacgcct gtaatcccaa cactttggga ggccaaggca ggcggatcac |
| 3001 | ctgaggtcag gagttcgaga ttagtctggc caacatggtg aaaccccatc tctactaaaa |
| 3061 | atacgaaatt agccaggtgt ggtggcacac atctgtagtc ccagctactc tggaggctga |
| 3121 | gacaggagaa tcgcttgaac ccaggaagtg gaggttgcag tgagctgaga tcacaccact |
| 3181 | gcactccagc ctgggagaga cagagtgaga ctccatctcg aaaaaaaaaa aaagatagaa |
| 3241 | gccaataagc atggtgcaat caaattctgg caagcattaa atatcaggat gcagctgggc |
| 3301 | acggtggctc acgcctgtaa tcccagcact ttgggaggcc aaggtgggcg gatcacttga |
| 3361 | ggtcaggaat ttgagaggat cctggccagc atggcaaaac cccatctgta cttaaaatac |
| 3421 | aaaaaaatta gctgggcgtg gtggtgcaca cctgtaatcc cagctacttg ggaggctgag |
| 3481 | gtgggagaat tgcttgaacc tgggaggtgg aggttgcagt gagctgagat cctgccactg |
| 3541 | cactccaggc tgggcaacag agtgagacca tgtctcaaaa aataaaaata aaataaaata |
| 3601 | atatcaggat gcatacatca gaggctgttc ctagtgtaaa ggcactttgg agggagaaga |
| 3661 | ctttcagagt taggcagacc aactaagagg tcagctgaag cacctaacca gttgtaagga |
| 3721 | ggtgaaagac agcaccccaa gaagagacgt gcaggaagga ggaaagaggc ttggtcataa |
| 3781 | aggatggagg aattccaaag tgacactgaa caggctgcgt ttatcctaaa ataaaaccac |
| 3841 | tcctcactct gtggatgcgt tgaagactca ttcccaaaca tctttattct ctaacttgcc |
| 3901 | ctcttcctct tcctaatatg ctcactcaag taaaattact agtgtcctaa tgcccctatg |
| 3961 | catattgtca aaaataaaaa tcagaagcag gttagatctg ttaggtcttc cagaagagca |
| 4021 | aacctgggat gaagccagag cccaggaatt ctgaaggtag cctttggact caggacaccc |
| 4081 | tactcttgtc tctcctctca gtttctctgc tatgaatctc ctgattcatg aacacgttat |
| 4141 | ctgttcaccc ttctctctag gtcttagttc ttagattttc cttctgtaaa atgcatgtga |
| 4201 | tcttattttc ccctccacaa ctttccagat gaactagact gtgaccaaga ggtctataaa |
| 4261 | atcaaagcat catggaacag gatcttgtat cagaccaaag tgtgccagtt tttaaaaatg |
| 4321 | tgcatcaaaa tggaagtctc agagacagag ccctctggtg gaaagttcta gtaggttagg |
| 4381 | acagtcctgc ctgcagacac cttgggcttt actgagggac tcaactgaga aaatgaggaa |
| 4441 | tgttgcagct catgattctt agaagaagaa agtgaagctt gtttaaaata tgatttaaaa |
| 4501 | aatctgtaga acactgtaaa ctacacaggc tatgagggaa tagcctggtt gggccagctt |
| 4561 | ggaaatcggg cacaggcagg aaggggcctg tctggtttgg gccgtgtcca cagagagcac |
| 4621 | ttcttaggtc ctgcctggag agaaggaatg gctgggctat attttcttcc agactcatta |
| 4681 | tttttcttct gtttgacttt tctctgaatt tcccttgatt tgtataaatt ttctcaataa |
| 4741 | ttagtgacag tgtctactga ttgtaaaatg aagcttgaag gccaggcgca gtggctcatg |
| 4801 | cctgtaatcc tagaattttg ggaggccaag gtgggtggat cacaaggagt tcgagaccag |
| 4861 | cctggccaag gttgtgaaac cgcgtctcta ctaaaaatac aaaaaaatta gccgggcatg |
| 4921 | gtggcacgtg cctgtagtcc cagctactca ggaagctgag gcaacagaat cacttgaacc |
| 4981 | tgggaggtgg aggttgcagt gagccgagat cacgccactg cactccagcc tgggcgagag |
| 5041 | agtgagactc cgtctcaaaa aaaaaaaaaa aaaaaaaagt ttgaagaaca aagacaataa |
| 5101 | gaggaaatat aatgagtggt cataaatgtg ggctctgaca gtagagtgcc tgggtctgca |
| 5161 | tcctggtttc ttagtcatgt gaccttaggc aagttacttt aacctcgctg tacctcaggt |
| 5221 | tgtccatctg taaaatgggg ataataatag tgcctacctt ttaaggttga tgtggggatt |
| 5281 | aaatgaggtg ttgctcatac aggaatgtgc ctgtgcatgg caaagttcgg gaaatttttt |
| 5341 | ataagctgtt ctaggcctga aatcttcaga agatgctaat ctaaattcat gaaataaggt |
| 5401 | tcttacaaca gaaatgctgc tagtattatg caaaattaat gttgtatatc aaacttttaa |
| 5461 | ctctcatccc tccttattca gatatatttt gttataagca atgtttgttc ccctcgttat |
| 5521 | tataccacag tctacttacc tgatgctata tctgcctccc cagttagact gagagaacag |
| 5581 | gggatatacc taaataataa taataataat aataataata aataataatg gagagctcct |
| 5641 | tgaagatagg gagcctgtaa gaatcattga gggcttattt tgtataccaa ctgctaaact |
| 5701 | agatgcttca tacattgttg tcaatactca tgacagcctt gtaaagtaga aattaattct |
| 5761 | tccagttaac actaaggctg acatatgaat accttggcaa atctggaaag ctgggaagac |
| 5821 | agtatttgaa ttcaagactt cttgtcacca agggccatgc acttgtactc tgccatgtgg |
| 5881 | ccctttttta cctcctgtgg attctcccta cctggtactt ggccttaggt gtacacacac |
| 5941 | ctggcacttt gcttgacaca taataggtgg accacaaata tctactaaat gaatatttgc |
| 6001 | atatagtaat attttaaggt actaaaagca gctcaaagta aatatattaa tatattaatt |
| 6061 | ccattgctat ctggataacc actcaacttt cctgctgaaa atgcccattt aattaaagaa |
| 6121 | ggttggatag agctctctat atgcattttg gacaggcagg ggtttcaggt cataaacatt |
| 6181 | ctgatgagtt aatataaaat aagagaaact gtaaatttcc actactaaaa atcacaaaaa |
| 6241 | taacagaaac aaaagaagag ataagaattt ggggaattgt gctgaacaat ttagtggtta |
| 6301 | aaaaaaacaa ctgtgcatgt ttagacttaa ataagccccc atccaagtgt gaggggtcca |
| 6361 | gtaatttttc aaaacatatg aaagtgttaa tacatttcga caaaggacca ttaaaaaagt |
| 6421 | cctgaattct gacttgaggg aggaaagtaa tgactaatac attctctaga gacttgcaga |
| 6481 | ctttgggaat tcataaagga atggatgata attattaact gttgctggct gattgcccag |
| 6541 | acagttctca acagccctgt acaagtctct gggtttggga tggatcaatt ctgagactgg |
| 6601 | aaaatggcca aatctttgca aatgagaaat atttttctta taagttctta ttgtaggcaa |
| 6661 | ataattacat agattattca tcagagaatt tttaaatgct cataatctca actctttcat |
| 6721 | ttacaacttg tatttccaat agtttatggg tcatctctgc atagatgtca gaagtcacct |
| 6781 | caagtttagc gtgtccaaaa tctaactcac aggtctgttt ctgacctccc aacttgcttt |
| 6841 | ccttgtgttt ttcctatgct aatgatccac cataatcaaa ataattaaca tttatccagt |
| 6901 | gcctactatg tactattccc tgtcctgttt tacatttact catttaaagt ccataagaaa |
| 6961 | cattaaatct catctgcctt ctgaagaaga tacaaccatg ctctctttta caaagtagga |
| 7021 | aactgggtca cagaaaggtg aagtctttaa ggctgaatca cagtagctca tcctagtaaa |
| 7061 | tagaaaagcc aggattcaac tccaggggct gggtgcagaa ctgctattct tcactgcttc |
| 7141 | accaatcagc agctacccaa ggcagaaaac tttttcatcc ttggctcctt cattctccct |
| 7201 | gtcaccccag atcccctcta catctagtca gagaataggt cctgtcaatt ccaacttctc |
| 7261 | tatatggctc ctctcaggca tgtgccctta attggcctaa ttctctaata caccttccct |
| 7321 | ctacatgctc actccctcag atcattgctt tatcacgtgt tacctgggtt gctattacat |
| 7381 | aaagagcaat ctttctaaaa tgaggatctt atcacttcac ttccacacta aaatgttttt |
| 7441 | cctggggaac cacactcctt agcaatctga cccatcagac cttccaggct gtctcctgcc |
| 7501 | tgctccctaa ggctccagcc acacagaatt atcatgggcc cacacaccca ccaaatcctc |
| 7561 | ccatgccttt gcccatgttg tctgggatgc ccttctctcc cttctgtcta catcaagcat |
| 7621 | cagactgaat atccctcttg tgcggccttc taaaacctcc cgtccaaagc gaaatatatt |
| 7681 | gccctctatt tatactttta cagcatttgg cacacaagta cagagtagta gctttttatc |
| 7741 | acattctctg ataattatat agatatggta tttcttagct ctctctccaa ctggctaata |
| 7801 | agttgctttt tgtctgagtg cctaattttg tgttttgtgt ctgagtgcct cagttcctca |
| 7861 | aaaaaaggtt ttttgattag ttcattattc atttgaacat ggaaattatg ctcactagtg |
| 7921 | gcaaatgcca ctaaccgtat tccagaagct aggtgtcatg tttgcaataa gatatattat |
| 7981 | cccttctaca agtcaccttt tatttcaggc atttgtaaat gcccattaat aaagtatggt |
| 8041 | tcataaattt taccttgtaa gtgcctaaga aatgagacta caagctccat ttcagcagga |
| 8101 | cacaataaat attattttat aatgcatcta aaaaaaaaaa aaaaaaa |

SEQ ID NO: 58 Human CD84 Isoform 3 Amino Acid Sequence (NP_001171810.1)

| | |
|---|---|
| 1 | maqhhlwill lclqtwpeaa gkdseiftyn gilgesvtfp vniqeprqvk iiawtsktsv |
| 61 | ayvtpgdset apvvtvthrn yyerihalgp nynlvisdlr medagdykad intqadpytt |
| 121 | tkrynlqiyr rlgkpkitqs lmasvnstcn vtltcsveke eknvtynwsp lgeegnvlqi |
| 161 | fqtpedqelt ytctaqnpvs nnsdsisarq lcadiamgfr thhtgllsvl amffllvlil |
| 241 | ssvflfrlfk rrqgaslqgr asehslfrsa vc |

SEQ ID NO: 59 Human CD84 Transcript Variant 4 cDNA Sequence
(NM_001184882.1; CDS: 80-724)

| | |
|---|---|
| 1 | ggaggaagaa aactcaagtg aaactgactc tgctagaaca gtgccgtgct tttccacaga |
| 61 | aggttagacc ctgaaagaga tggctcagca ccacctatgg atcttgctcc tttgcctgca |
| 121 | aacctgtcgg cttgggaaac caaaaattac acagagttta atggcatctg tgaacagcac |
| 161 | ctgtaatgtc acactgacat gctctgtaga gaaagaagaa aagaatgtga catacaattg |
| 241 | gagtcccctg ggagaagagg gtaatgtcct tcaaatcttc cagactcctg aggaccaaga |
| 301 | gctgacttac acgtgtacag cccagaaccc tgtcagcaac aattctgact ccatctctgc |
| 361 | ccggcagctc tgtgcagaca tcgcaatggg cttccgtact caccacaccg ggttgctgag |
| 421 | cgtgctggct atgttctttc tgcttgttct cattctgtct tcagtgtttt tgttccgttt |
| 481 | gttcaagaga agacaagatg ctgcctcaaa gaaaaccata tacacatata tcatggcttc |
| 541 | aaggaacacc cagccagcag agtccagaat ctatgatgaa atcctgcagt ccaaggtgct |
| 601 | tccctccaag gaagagccag tgaacacagt ttattccgaa gtgcagtttg ctgataagat |
| 661 | ggggaaagcc agcacacagg acagtaaacc tcctgggact tcaagctatg aaattgtgat |
| 721 | ctaggctgct gggctgaatt ctccctctgg aaactgagtt acaaccacca atactggcag |
| 761 | gttccctgga tccagatctt ctctgcccaa ctcttactgg gagattgcaa actgccacat |
| 641 | ctcagcctgt aagcaaagca ggaaaccttc tgctgggcat agcttgtgcc taaatggaca |
| 901 | aatggatgca tacccttcct gaaatgactc ccttctgaat gaatgacaaa gcaggttacc |
| 961 | tagtatagtt ttcccaaact tcttcccatc atagcacatg tagaaaataa tatttttatg |
| 1021 | gcacactggg ataaacaagc aagattgctc acttctggaa gctgcatatg actagaggcc |
| 1081 | tcttgtgact ggaggtaaca accctgccca gtaactgtgg gagaagggga tcaatatttt |
| 1141 | gcacacctgt aataggccat ggcacaccag ccaagatgct ctgctcacag tcagtatgtg |
| 1201 | tgaagatccc tggtgcgtgg ccttcaccac gcatcttgag caaattagga aaatgtaccc |
| 1261 | ttcgcttgag gcagatgcag cccttccccc gagtgcatgg cttggagagc agaatgtggg |
| 1321 | ctgcatataa gcacactcat ccctttgtct gggaatcttt gtgcagggca taacaggctt |
| 1381 | agtaagtcca aacacagatg acagtgctgt gtgggtctct gtcagagttg tggctctcag |
| 1441 | ccatgtagac acactctcca aatggagtgt tggaaaatgt tctttctgca gggtctagag |
| 1501 | actgctggga cacttttctt ggagtgctac ttcagaagcc ttataggatt ttctttctgg |
| 1561 | ccaagatttc cttctgtatc actccaagca gcctcagcag aaccagcagc catgcccagt |
| 1621 | attcccactc tccaaaagga actgaccagc ttatatttct cacacttctg gggaactggg |
| 1681 | tataatccaa ccatcaaaat agaagacctt gcaagaagca gagtcattct ccagaaggaa |
| 1741 | cttgggagat gatggtgcag atgatgaaac tgggttcatc ccagttccaa agactcagag |
| 1801 | aactagagtt taagctgagg cagagtgccg ccaccctggc atgccccaca aacagatcac |
| 1861 | cagccagctt acacaggcat taactctcct caatgaggaa gaatcattca caactgagca |
| 1921 | agacattcat atgatcattt aaggaagtgt ttcccttatg tgttagcaag tataatcggc |
| 1981 | taactcctaa atcccaatga atagtcctag gctggacagc aatgggctgc aattaggcag |
| 2041 | ataaagacat cagtcccagt aaatgaatcc atagactcat ctagcaccaa ctaccattag |
| 2101 | cactatgtta ggagctgcaa ggccccaaag tagaagatgt gcataatgtc tgctcttgtg |
| 2161 | tagctcagga gacaattcca gcacagacac tacagttaac gctgaactgc agctgcaagt |
| 2221 | aatagcatga acagtcagaa aaatacctta tgagggggca gggctgaagc tgggccttga |
| 2281 | aggatggatg aaatttggat agagaatgag gaagacagag ggcctccaag tgagagaagc |
| 2341 | atgaaaaatg agcaggggcc tggatcagtg gggtgtattc agagcacctc tccagatgca |
| 2401 | ccatgcatgc tcacagtccc ttgcctatgt gtggcagagt gtcccagcca gatgtgtgcc |
| 2461 | ctcaccccat gtccatttac atgtccttca atgcccacct caaaaggtac ctcttctgta |
| 2521 | aagctttccc tggtatcagg aatcaaaatt aatcagggat cttttcacac tgctgttttt |
| 2581 | tcctctttgg tccttctatc actaaaactc atctcattca gccttagagc ataactaatt |
| 2641 | atttgttttc ctcactacat tgtacatgtg ggaattacag ataaacggaa gccggctggg |
| 2701 | gtggtggctc acgcctgtaa tcccaacact ttgggaggcc aaggcaggcg gatcacctga |
| 2761 | ggtcaggagt tcgagattag tctggccaac atggtgaaac cccatctcta ctaaaaatac |
| 2821 | gaaattagcc aggtgtggtg gcacacatct gtagtcccag ctactctgga ggctgagaca |
| 2881 | gcccaatcgc ttgaacccag gaagtggagg ttgcagtgag ctgagatcac accactgcac |
| 2941 | tccagcctgg gagagacaga gtgagactgg atctcgaaaa aaaaaaaaag atagaagcca |
| 3001 | ataagcatgg tgcaatcaaa ttctggcaag cattaaatat caggatgcag ctgggcacgg |
| 3061 | tggctcacgc ctgtaatccc agcactttgg gaggccaagg tgggcggatc acttgaggtc |
| 3121 | aggaatttga gaggatcctg gccagcatgg caaaacccca tctgtactta aaatacaaaa |
| 3181 | aaattagctg ggcgtggtgg tgcacacctg taatcccagc tacttgggag gctgaggtgg |
| 3241 | gagaattgct tgaacctggg aggtggaggt tgcagtgagc tgagatcctg ccactgcact |
| 3301 | ccaggctggg caacagagtg agaccatgtc tcaaaaaata aaaataaaat aaaataatat |
| 3361 | caggatgcat acatcagagg ctgttcctag tgtaaaggca ctttggaggg agaagacttt |
| 3421 | cagagttagg cagaccaact aagaggtcag ctgaagcacc taaccagttg taaggaggtg |
| 3481 | aaagacagca ccccaagaag agacgtgcag gaaggaggaa agaggcttgg tcataaagga |
| 3541 | tggaggaatt ccaaagtgac actgaacagg ctgcgtttat cctaaaataa aaccactcct |
| 3601 | cactctgtgg atgcgttgaa gactcattcc caaacatctt tattctctaa cttggcctct |
| 3661 | tcctcttcct aatatgctca ctcaagtaaa attactagtg tcctaatgcc cctatgcata |
| 3721 | ttgtcaaaaa taaaaatcag aagcaggtta gatctgttag gtcttccaga agagcaaacc |
| 3781 | tgggatccag ccagagccca ggaattctga aggtagcctt tggactcagg acaccctact |
| 3841 | cttgtctctc ctctcagttt ctctgctatg aatctcctga ttcatgaaca cgttatctgt |
| 3901 | tcacccttct ctctaggtct tagttcttag attttccttc tgtaaaatgc atgtgatctt |
| 3961 | attttcccct ccacaacttt ccagatgaac tagactgtga ccaagaggtc tataaaatca |
| 4021 | aagcatcatg gaagaggatc ttgtatcaga ccaaagtgtg ccagttttta aaaatgtgca |
| 4081 | tcaaaatgga agtctcagag acagagccct ctggtggaaa gttctagtag gttaggacag |
| 4141 | tcctgcctgc agacaccttg ggctttactg agggactcaa ctgagaaaat gaggaatgtt |
| 4201 | gcagctcatg attcttagaa gaagaaagtg aagcttgttt aaaatatgat ttaaaaaatc |
| 4261 | tgtagaacac tgtaaactac acaggctatg agggaatagc ctggttgggc cagcttggaa |
| 4321 | atcgggcaca ggcaggaagg ggcctgtctg gtttgggccg tgtccacaga gagcacttct |
| 4381 | taggtcctgc ctggagagaa ggaatggctg ggctatattt tcttccagac tcattatttt |
| 4441 | tcttctgttt gacttttctc tgaatttccc ttgatttgta taaattttct caataattag |
| 4501 | tgacagtgtc tactgattgt aaaatgaagc ttgaaggcca ggcgcagtgg ctcatgcctg |
| 4561 | taatcctaga attttgggag gccaaggtgg gtggatcaca aggagttcga gaccagcctg |
| 4621 | gccaaggttg tgaaaccgcg tctctactaa aaatacaaaa aaattagccg ggcatggtgg |
| 4681 | cacgtgcctg tagtcccagc tactcaggaa gctgaggcaa cagaatcact tgaacctggg |
| 4741 | aggtggaggt tgcagtgagc cgagatcacg ccactgcact ccagcctggg cgagagagtg |
| 4801 | agactccgtc tcaaaaaaaa aaaaaaaaaa aaaagtttga agaacaaaga caataagagg |
| 4861 | aaatataatg agtggtcata aatgtgggct ctgacagtag agtgcctggg tctgcatcct |
| 4921 | ggtttcttag tcatgtgacc ttaggcaagt tactttaacc tcgctgtacc tcaggttgtc |
| 4981 | catctgtaaa atggggataa taatagtggc taccttttaa ggttgatgtg gggattaaat |
| 5041 | gaggtgttgc tcatacagga atgtgcctgt gcatggcaaa gttcgggaaa ttttttataa |
| 5101 | gctgttctag gcctgaaatc ttcagaagat gctaatctaa attcatgaaa taagcttctt |
| 5161 | acaacagaaa tgctgctagt attatgcaaa attaatgttg tatatcaaac ttttaactct |
| 5221 | catccctcct tattcagata tattttgtta taagcaatgt ttgttcccct cgttattata |
| 5281 | ccacagtcta cttacctgat gctatatctg cctccccagt tagactgaga gaacagggga |
| 5341 | tatacctaaa taataataat aataataata ataataaata ataatggaga gctccttgaa |
| 5401 | gatagggagc ctgtaagaat cattgagggc ttattttgta taccaactgc taaactagat |
| 5461 | gcttcataca ttgttgtcaa tactcatgac agccttgtaa agtagaaatt aattcttcca |
| 5521 | gttaacacta aggctgacat atgaatacct tggcaaatct ggaaagctgg gaagacagta |
| 5581 | tttgaattca agacttcttg tcaccaaggg ccatgcactt gtactctgcc atgtggccct |
| 5641 | tttttacctc ctgtggattc tccctacctg gtacttggcc ttaggtgtac acacacctgg |
| 5701 | cactttgctt gacacataat aggtggacca caaatatcta ctaaatgaat atttgcatat |
| 5761 | agtaatattt taaggtactd aaagcagctc aaagtaaata tattaatata ttaattccat |
| 5821 | tgctatctgg ataaccactc aactttcctg ctgaaaatgc ccatttaatt aaagaaggtt |
| 5881 | ggatagagct ctctatatgc attttggaca ggcaggggtt tcaggtcata aacattctga |
| 5941 | tgagttaata taaaataaga gaaactgtaa atttccacta ctaaaaatca caaaaataac |
| 6001 | accaacaaaa gaagagataa gaatttgggg aattgtgctg aacaatttag tggttaaaaa |
| 6061 | aaacaactgt gcatgtttag acttaaataa gcccccatcc aagtgtgagg ggtccagtaa |
| 6121 | tttttcaaaa catatgaaag tgttaataca tttcgacaaa ggaccattaa aaaagtcctg |
| 6181 | aattctgact tgagggagga aagtaatgac taatacattc tctagagact tgcagacttt |
| 6241 | gggaattcat aaaggaatgg atgataatta ttaactgttg ctggctgatt gcccagacag |
| 6301 | ttctcaacag ccctgtacaa gtctctgggt ttgggatgga tcaattctga gactggaaaa |
| 6361 | tggccaaatc tttgcaaatg agaaatattt ttcttataag ttcttattgt aggcaaataa |
| 6421 | ttacatagat tattcatcag agaattttta aatgctcata atctcaactc tttcatttac |
| 6481 | aacttgtatt tccaatagtt tatgggtcat ctctgcatag atgtcagaag tcacctcaag |
| 6541 | tttagcgtgt ccaaaatcta actcacaggt ctgtttctga cctcccaact tgctttcctt |
| 6601 | gtgtttttcc tatgctaatg atccaccata atcaaaataa ttaacattta tccagtgcct |
| 6661 | actatgtact attccctgtc ctgttttaca tttactcatt taaagtccat aagaaacatt |
| 6721 | aaatctcatc tgccttctga agaagataca accatgctct cttttacaaa gtaggaaact |
| 6781 | gggtcacaga aaggtgaagt ctttaaggct gaatcacagt agctcatcct agtaaataga |
| 6841 | aaagccagga ttcaactcca ggggctgggt gcagaactgc tattcttcac tgcttcacca |
| 6901 | atcagcagct acccaaggca gaaaactttt tcatcattgg ctccttcatt ctccctgtca |
| 6961 | ccccagatcc cctctacatc tagtcagaga ataggtcctg tcaattccaa cttctctata |
| 7021 | tggctcctct caggcatgtg cccttaattg gcctaattct ctaatacacc ttccctctac |
| 7081 | atgctcactc cctcagatca ttgctttatc acgtgttacc tgggttgcta ttacataaag |
| 7141 | agcaatcttt ctaaaatgag gatattatca cttcacttcc acactaaaat gtttttcctg |
| 7201 | gggaaccaca ctccttagca atctgaccca tcagaccttc caggctgtct cctgcctgct |
| 7261 | ccctaaggct ccagccacac agaattatca tgggcccaca cacccaccaa atcctcccat |
| 7321 | gcctttgccc atgttgtctg ggatgccctt ctctcccttc tgtctacatc aagcatcaga |
| 7381 | ctgaatatcc ctcttgtgcg gccttctaaa acctcccgtc caaagcgaaa tatattgccc |
| 7441 | tgtatttata cttttacagc atttggcaca caagtacaga gtagtagctt tttatcacat |
| 7501 | tctctgataa ttatatagat atggtatttc ttagctctct ctccaactgg ctaataagtt |
| 7561 | gctttttgtc tgagtgccta attttgtgtt ttgtgtctga gtgcctcagt tcctcaaaaa |
| 7621 | aaggtttttt gattagttca ttattcattt gaacatggaa attatgctca ctagtggcaa |
| 7681 | atgccactaa ccgtattcca gaagctaggt gtcatgtttg caataagata tattatccct |
| 7741 | tatacaagtc accttttatt tcaggcattt gtaaatgccc attaataaag tatggttcat |
| 7801 | aaattttacc ttgtaagtgc ctaagaaatg agactacaag ctccatttca gcaggacaca |
| 7861 | ataaatatta ttttataatg catctaaaaa aaaaaaaaaa aaa |

SEQ ID NO: 60 Human CD84 Isoform 4 Amino Acid Sequence (NP_001171811.1)

| | |
|---|---|
| 1 | maqhhlwill lclqtcrlgk pkitqslmas vnstcnvtlt csvekeeknv tynwsplgee |
| 61 | gnvlgifqtp edqeltytct aqnpvsnnsd sisarqlcad iamgfrthht gllsvlamff |
| 121 | llvlilssvf lfrlfkrrqd aaskktiyty imasrntqpa esriydeilq skvlpskeep |
| 181 | vntvysevqf adkmgkastq dskppgtssy eivi |

SEQ ID NO: 61 Human CD84 Transcript Variant 5 cDNA Sequence
(NM_001330742.1; CDS: 80-1099)

| | |
|---|---|
| 1 | ggaggaagaa aactcaagtg aaactgactc tgctagaaca gtgccgtgct tttccacaga |
| 61 | aggttagacc ctgaaagaga tggctcagca ccacctatgg atcttgctcc tttgcctgca |
| 121 | aacctggccg gaagcagctg gaaaagactc agaaatcttc acagtgaatg ggattctggg |
| 181 | agagtcagtc actttccctg taaatatcca agaaccacgg caagttaaaa tcattgcttg |
| 241 | gacttctaaa acatctgttg cttatgtaac accaggagac tcagaaacag cacccgtagt |
| 301 | tactgtgacc cacagaaatt attatgaacg gatacatgcc ttaggtccga actacaatct |
| 361 | ggtcattagc gatctgagga tggaagacgc aggagactac aaagcagaca taaatacaca |
| 421 | ggctgatccc tacaccacca ccaagcgcta caacctgcaa atctatcgtc ggcttgggaa |
| 481 | accaaaaatt acacagagtt taatggcatc tgtgaacagc acctgtaatg tcacactgac |
| 541 | atgctctgta gagaaagaag aaaagaatgt gacatacaat tggagtcccc tgggagaaga |
| 601 | gggtaatgtc cttcaaatct tccagactcc tgaggaccaa gagctgactt acacgtgtac |
| 661 | agcccagaac cctgtcagca acaattctga ctccatctct gcccggcagc tctgtgcaga |
| 721 | catcgcaatg ggcttccgta ctcaccacac cgggttgctg agcgtgctgg ctatgttctt |
| 781 | tctgcttgtt ctcattctgt cttcagtgtt tttgttccgt ttgttcaaga gaagacaagg |
| 841 | ttcctgcttg aacaccttca ctaagaaccc ttatgctgcc tcaaagaaaa ccatatacac |
| 901 | atatatcatg gcttcaagga acacccagcc agcagagtcc agaatctatg atgaaatcct |
| 961 | gcagtccaag gtgcttccct ccaaggaaga gccagtgaac acagtttatt ccgaagtgca |
| 1021 | gtttgctgat aagatgggga aagccagcac acaggacagt aaacctcctg ggacttcaag |
| 1081 | ctatgaaatt gtgatctagg ctgctgggct gaattctccc tctggaaact gagttacaac |
| 1141 | caccaatact ggcaggttcc ctggatccag atcttctctg cccaactctt actgggagat |
| 1201 | tgcaaactgc cacatctcag cctgtaagca aagcaggaaa ccttctgctg ggcatagctt |
| 1261 | gtgcctaaat ggacaaatgg atgcataccc ttcctgaaat gactcccttc tgaatgaatg |
| 1321 | acaaagcagg ttacctagta tagttttccc aaacttcttc ccatcatagc acatgtagaa |
| 1381 | aataatattt ttatggcaca ctgggataaa caagcaagat tgctcacttc tggaagctgc |
| 1441 | atatgactag aggcctcttg tgactggagg taacaaccct gcccagtaac tgtgggagaa |
| 1501 | ggggatcaat attttgcaca cctgtaatag gccatggcac accagccaag atgctctgct |
| 1561 | cacagtcagt atgtgtgaag atccctggtg cgtggccttc accacgcatc ttgagcaaat |
| 1621 | taggaaaatg tacccttcgc ttgaggcaga tgcagccctt cccccgagtg catggcttgg |
| 1681 | agagcagaat gtgggctgca tataagcaca ctcatccctt tgtctgggaa tctttgtgca |
| 1741 | gggcataaca ggcttagtaa gtccaaacac agatgacagt gctgtgtggg tctctgtcag |
| 1801 | agttgtggct ctcagccatg tagacacact ctccaaatgg agtgttggaa aatgttcttt |
| 1861 | ctgcagggtc tagagactgc tgggacactt ttcttggagt gctacttcag aagccttata |
| 1921 | ggattttctt tctggccaag atttccttct gtatcactcc aagcagcctc agcagaagaa |
| 1981 | gcagccatgc ccagtattcc cactctccaa aaggaactga ccagcttata tttctcacac |
| 2041 | ttctggggaa ctgggtataa tccaaccatc aaaatagaag accttgcaag aagcagagtc |
| 2101 | attctccaga aggaacttgg gagatgatgg tgcagatgat gaaactgggt tcatcccagt |
| 2161 | tccaaagact cagagaacta gagtttaagc tgaggcagag tgccgccacc ctggcatgcc |
| 2221 | ccacaaacag atcaccagcc agcttacaca ggcattaact ctcctcaatg aggaagaatc |
| 2281 | attcacaact gagcaagaca ttcatatgat catttaagga agtgtttccc ttatgtgtta |
| 2341 | gcaagtataa tcggctaact cctaaatccc aatgaatagt cctaggctgg acagcaatgg |
| 2401 | gctgcaatta ggcagataaa gacatcagtc ccagtaaatg aatccataga ctcatctagc |
| 2461 | accaactacc attagcacta tgttaggagc tgcaaggccc caaagtagaa gatgtgcata |
| 2521 | atgtctgctc ttgtgtagct caggagacaa ttccagcaca gacactacag ttaacgctga |
| 2581 | actgcagctg caagtaatag catgaacagt cagaaaaata ccttatgagg gggcagggct |
| 2641 | gaagctgggc cttgaaggat ggatgaaatt tggatagaga atgaggaaga cagagggcct |
| 2701 | ccaagtgaga gaagcatgaa aaatgagcag gggcctggat cagtggggtg tattcagagc |
| 2761 | acctctccag atgcaccatg catgctcaca gtcccttgcc tatgtgtggc agagtgtccc |
| 2821 | agccagatgt gtgccctcac cccatgtcca tttacatgtc cttcaatgcc cacctcaaaa |
| 2881 | ggtacctctt ctgtaaagct ttccctggta tcaggaatca aaattaatca gggatctttt |
| 2941 | cacactgctg ttttttcctc tttggtcctt ctatcactaa aactcatctc attcagcctt |
| 3001 | acagcataac taattatttg ttttcctcac tacattgtac atgtgggaat tacagataaa |
| 3061 | cggaagccgg ctggggtggt ggctcacgcc tgtaatccca acactttggg aggccaaggc |
| 3121 | aggcggatca cctgaggtca ggagttcgag attagtctgg ccaacatggt gaaaccccat |
| 3181 | ctctactaaa aatacgaaat tagccaggtg tggtggcaca catctgtagt cccagctact |
| 3241 | ctggaggctg agacaggaga atcgcttgaa cccaggaagt ggaggttgca gtgagctgag |
| 3301 | atcacaccac tgcactccag cctgggagag acagagtgag actccatctc gaaaaaaaaa |
| 3361 | aaaagataga agccaataag catggtgcaa tcaaattctg gcaagcatta aatatcagga |
| 3421 | tgcagctggg cacggtggct cacgcctgta atcccagcac tttgggaggc caaggtgggc |
| 3481 | ggatcacttg aggtcaggaa tttgagagga tcctggccag catggcaaaa ccccatctgt |
| 3541 | acttaaaata caaaaaaatt agctgggcgt ggtggtgcac acctgtaatc ccagctactt |
| 3601 | gggaggctga ggtgggagaa ttgcttgaac ctgggaggtg gaggttgcag tgagctgaga |
| 3661 | tcctgccact gcactccagg ctgggcaaca gagtgagacc atgtctcaaa aaataaaaat |
| 3721 | aaaataaaat aatatcagga tgcatacatc agaggctgtt cctagtgtaa aggcactttg |
| 3781 | gagggagaag actttcagag ttaggcagac caactaagag gtcagctgaa gcacctaacc |
| 3841 | agttgtaagg aggtgaaaga cagcacccca agaagagacg tgcaggaagg aggaaagagg |
| 3901 | cttggtcata aaggatggag gaattccaaa gtgacactga acaggctgcg tttatcctaa |
| 3961 | aataaaacca ctcctcactc tgtggatgcg ttgaagactc attcccaaac atctttattc |
| 4021 | tctaacttgc cctcttcctc ttcctaatat gctcactcaa gtaaaattac tagtgtccta |
| 4081 | atgcccctat gcatattgtc aaaaataaaa atcagaagca ggttagatct gttaggtctt |
| 4141 | ccagaagagc aaacctggga tgaagccaga gcccaggaat tctgaaggta gcctttggac |
| 4201 | tcaggacacc ctactcttgt ctctcctctc agtttatctg ctatgaatct cctgattcat |
| 4261 | gaacacgtta tctttcacac cttctctcta ggtcttagtt cttagatttt ccttctgtaa |
| 4321 | aatgcatgtg atcttatttt cccctccaca actttccaga tgaactagac tgtgaccaag |
| 4381 | aggtctataa aatcaaagca tcatggaaca ggatcttgta tcagaccaaa gtgtgccagt |
| 4441 | ttttaaaaat gtgcatcaaa atggaagtct cagagacaga gccctctggt ggaaagttct |
| 4501 | agtaggttag gacagtcctg cctgcagaca ccttgggctt tactgaggga ctcaactgag |
| 4561 | aaaatgagga atgttgcagc tcatgattct tagaagaaga aagtgaagct tgtttaaaat |
| 4621 | atgatttaaa aaatctgtag aacactgtaa actacacagg ctatgaggga atagcctggt |
| 4681 | tgggccagct tggaaatcgg gcacaggcag gaaggggcct gtctggtttg ggccgtgtcc |
| 4741 | acagagagca cttcttaggt cctgcctgga gagaaggaat ggctgggcta tattttcttc |
| 4801 | cagactcatt atttttcttc tgtttgactt ttctctgaat ttcccttgat ttgtataaat |
| 4861 | tttctcaata attagtgaca gtgtctactg attgtaaaat gaagcttgaa ggccaggcgc |
| 4921 | agtggctcat gcctgtaatc ctagaatttt gggaggccaa ggtgggtgga tcacaaggag |
| 4981 | ttcgagacca gcctggccaa ggttgtgaaa ccgcgtctct actaaaaata caaaaaaatt |
| 5041 | agccgggcat ggtggcacgt gcctgtagtc ccagctactc aggaagctga ggcaacagaa |
| 5101 | tcacttgaac ctgggaggtg gaggttgcag tgagccgaga tcacgccact gcactccagc |
| 5161 | ctgggcgaga gagtgagact ccgtctcaaa aaaaaaaaaa aaaaaaaaag tttgaagaac |
| 5221 | aaagacaata agaggaaata taatgagtgg tcataaatgt gggctctgac agtagagtgc |
| 5281 | ctgggtctgc atcctggttt cttagtcatg tgaccttagg caagttactt taacctcgct |
| 5341 | gtacctcagg ttgtccatct gtaaaatggg gataataata gtgcctacct tttaaggttg |
| 5401 | atgtggggat taaatgaggt gttgctcata caggaatgtg cctgtgcatg gcaaagttcg |
| 5461 | ggaaattttt tataagctgt tctaggcctg aaatcttcag aagatgctaa tctaaattca |
| 5521 | tgaaataagc ttcttacaac agaaatgctg ctagtattat gcaaaattaa tgttgtatat |
| 5581 | caaactttta actctcatcc ctccttattc agatatattt tgttataagc aatgtttgtt |
| 5641 | cccctcgtta ttataccaca gtctacttac ctgatgctat atctgcctcc ccagttagac |
| 5701 | tgagagaaca ggggatatac ctaaataata ataataataa taataataat aaataataat |
| 5761 | ggagagctcc ttgaagatag ggagcctgta agaatcattg agggcttatt ttgtatacca |
| 5821 | actgctaaac tagatgcttc atacattgtt gtcaatactc atgacagcct tgtaaagtag |
| 5881 | aaattaattc ttccagttaa cactaaggct gacatatgaa taccttggca aatctggaaa |
| 5941 | gctgggaaga cagtatttga attcaagact tcttgtcacc aagggccatg cacttgtact |
| 6001 | ctgccatgtg gccctttttt acctcctgtg gattctccct acctggtact tggccttagg |
| 6061 | tgtacacaca cctggcactt tgcttgacac ataataggtg gaccacaaat atctactaaa |
| 6121 | tgaatatttg catatagtaa tattttaagg tactaaaagc agctcaaagt aaatatatta |
| 6181 | atatattaat tccattgcta tctggataac cactcaactt tcctgctgaa aatgcccatt |
| 6241 | taattaaaga aggttggata gagctctcta tatgcatttt ggacaggcag gggtttcagg |
| 6301 | tcataaacat tctgatgagt taatataaaa taagagaaac tgtaaatttc cactactaaa |
| 6361 | aatcacaaaa ataacagaaa caaaagaaga gataagaatt tggggaattg tgctgaacaa |
| 6421 | tttagtggtt aaaaaaaaca actgtgcatg tttagactta aataagcccc catccaagtg |
| 6481 | tgaggggtcc agtaattttt caaaacatat gaaagtgtta atacatttcg acaaaggacc |
| 6541 | attaaaaaag tcctgaattc tgacttgagg gaggaaagta atgactaata cattctctag |
| 6601 | agacttgcag actttgggaa ttcataaagg aatggatgat aattattaac tgttgctggc |
| 6661 | tgattgccca gacagttctc aacagccctg tacaagtctc tgggtttggg atggatcaat |
| 6721 | tctgagactg gaaaatggcc aaatctttgc aaatgagaaa tatttttctt ataagttctt |
| 6781 | attgtaggca aataattaca tagattattc atcagagaat ttttaaatgc tcataatctc |
| 6841 | aactctttca tttacaactt gtatttccaa tagtttatgg gtcatctctg catagatgtc |
| 6901 | agaagtcacc tcaagtttag cgtgtccaaa atctaactca caggtctgtt tctgacctcc |
| 6961 | caacttgctt tccttgtgtt tttcctatgc taatgatcca ccataatcaa aataattaac |
| 7021 | atttatccag tgcctactat gtactattcc ctgtcctgtt ttacatttac tcatttaaag |
| 7081 | tccataagaa acattaaatc tcatctgcct tctgaagaag atacaaccat gctctctttt |
| 7141 | acaaagtagg aaactgggtc acagaaaggt gaagtcttta aggctgaatc acagtagctc |
| 7201 | atcctagtaa atagaaaagc caggattcaa ctccaggggc tgggtgcaga actgctattc |
| 7261 | ttcactgctt caccaatcag cagctaccca aggcagaaaa ctttttcatc cttggctcct |
| 7321 | tcattctccc tgtcacccca gatcccctct acatctagtc agagaatagg tcctgtcaat |
| 7381 | tccaacttct ctatatggct cctctcaggc atgtgccctt aattggccta attctctaat |
| 7441 | acaccttccc tctacatgct cactccctca gatcattgct ttatcacgtg ttacctgggt |
| 7501 | tgctattaca taaagagcaa tctttctaaa atgaggatct tatcacttca cttccacact |
| 7561 | aaaatgtttt tcctggggaa ccacactcct tagcaatctg acccatcaga ccttccaggc |
| 7621 | tgtctcctgc ctgctcccta aggctccagc cacacagaat tatcatgggc ccacacaccc |
| 7681 | accaaatcct cccatgcctt tgcccatgtt gtctgggatg cccttctctc ccttctgtct |
| 7741 | acatcaagca tcagactgaa tatccctctt gtgcggcctt ctaaaacctc ccgtccaaag |
| 7801 | cgaaatatat tgccctctat ttatactttt acagcatttg gcacacaagt acagagtagt |
| 7861 | agctttttat cacattctct gataattata tagatatggt atttcttagc tctctctcca |
| 7921 | actggctaat aagttgcttt ttgtctgagt gcctaatttt gtgttttgtg tctgagtgcc |
| 7961 | tcagttcctc aaaaaaaggt tttttgatta gttcattatt catttgaaca tggaaattat |
| 8041 | gctcactagt ggcaaatgcc actaaccgta ttccagaagc taggtgtcat gtttgcaata |
| 8101 | agatatatta tcccttctac aagtcacctt ttatttcagg catttgtaaa tgcccattaa |
| 8161 | taaagtatgg ttcataaatt ttaccttgta agtgcctaag aaatgagact apaagctcca |
| 8221 | tttcagcagg acacaataaa tattatttta taatgcatct a |

SEQ ID NO: 62 Human CD84 Isoform 5 Amino Acid Sequence (NP_001317671.1)

| | |
|---|---|
| 1 | maqhhlwill lclqtwpeaa gkdseiftvn gilgesvtfp vniqeprqvk iiawtsktsv |
| 61 | ayvtpgdset apvvtvthrn yyerihalgp nynlvisdlr medagdykad intqadpytt |
| 121 | tkrynlqiyr rlgkpkitqs lmasvnstcn vtltcsveke eknvtynwsp lgeegnvlqi |
| 181 | fqtpedqelt ytctaqnpvs nnsdsisarq lcadiamgfr thhtgllsvl amffllvlil |
| 241 | ssvflfrlfk rrqgsclntf tknpyaaskk tiytyimasr ntqpaesriy deilqskvlp |
| 301 | skeepvntvy sevqfadkmg kastqdskpp gtssyeivi |

SEQ ID NO: 63 Mouse CD84 Transcript Variant 1 cDNA Sequence (NM_013489.3;
CDS: 180-1169)

| | |
|---|---|
| 1 | agtgcttgga gttcctctgt gactgaccac ttcttccttt tctgtctaat ggtgaacacc |
| 61 | tttctggacc agctctggac cagaatctga tttatgctct gctccggaaa caccacactg |
| 121 | aagtgaaagc agctaccaca ccagttattt ttcctcagaa gactggagtc tgactggaca |
| 181 | tggcccagcg ccatctgtgg atctggttcc tttgcctaca aacctggtct gaagcagcag |
| 241 | gaaaagatgc agacccggtg gtaatgaatg ggattcttgg ggagtcagtt actttcctct |
| 301 | taaatattca agaaccaaag aaaattgaca acattgcctg gacttctcaa tcatctgttg |
| 361 | cttttataaa accaggagtc aataaagctg aagttaccat aacccagggc acttataaag |
| 421 | gacgaataga aatcatagat cagaagtatg acctggtcat tagagacctg aggatggaag |
| 481 | atgcaggaac ttacaaagca gacatcaatg aagagaatga ggaaaccatc accaagatct |
| 541 | actaccttca tatctaccgt cgacttaaaa caccaaaaat tacacagagt ttgatatcat |
| 601 | ctttgaacaa tacctgtaat atcacactga catgctctgt ggaagaggaa gagaaggatg |
| 661 | tcacatatag ctggagtccc tttggagaga aaagcaatgt ccttcaaatc gtccactccc |
| 721 | ccatggacca aaaactgacc tacacatgta cagcccagaa ccctgtcagc aacagttctg |
| 781 | actctgtcac tgtccagcag ccatgtacag acactccaag cttccatcct cgccatgctg |
| 841 | tgttgccagg aggattggcc gtgctctttc tgcttattct cattccgatg ttggcatttc |
| 901 | tgttccgttt gtataagaga aggcgagaca ggattgtcct ggaagcagat gatgtctcaa |
| 961 | agaaaacagt atatgctgta gtttcaagaa atgctcaacc cacagagtcc agaatctatg |
| 1021 | atgaaatccc tcagtccaag atgctgtcct gtaagaaaga tccggtgacc accatttatt |
| 1081 | cctcagtgca gctttctgag aagatgaagg aaaccaacat gaaggacaga agtptgccta |
| 1141 | aggctttggg taatgaaatt gttgtctagg tgattctcta agaccacgaa ggacacaagg |
| 1201 | acaagtcatc tatgaggatt ccatcaacgg tttcagtctt ttggatataa cctgggccag |
| 1261 | ccaagggatt taggaatgaa gcaagctccg tgggtagagg tctgatcccc agtgtgtaat |
| 1321 | gttaggggcc atgtacagga ttgactctca ggcccacaga tctttaccca gagaaaccct |
| 1381 | gacctgctcc catgctgttt ttcctgggga aaggacccta gggcactcaa cctttatgca |
| 1441 | atcagacatg cctctcagag actgtctaac agcttccaga ctaatctctg tgcagtactt |
| 1501 | agtcttacaa ctctcacggg caacggcttc aagttccaat tttacgatgt gtctagcctg |
| 1561 | ggatgactgt ttagtttcta atgtggcgag aatgtatgtt accatgtagg aagcacagac |
| 1621 | tatggcaatc tataaatgat ttgtggcatg agactgatgt ccgaatttag gggaagggga |
| 1681 | atggtcttac ttaggcattt tatggaaatt gagtctctct ccccgagaag agggtgatga |
| 1741 | agcagcatcc acgtctgcct cttctccagt aacctgcttg ttatcgacaa tgtcgagccg |
| 1801 | atggtaatga actgagacaa atgcgcttga aagagatgaa tcaatttgag atttaacaaa |
| 1861 | tcgggtcaat ttctgaaatg cccaaggacc gaaggagatc aataatagga gtcccaatag |
| 1921 | gggccctaaa agggagggca acaaggttga aagtcagggg gaggttgaaa accagttttg |
| 1981 | gtagtctacc ttccccctag gccattgtaa atacttgtgt atgggtgtga ctcagctatc |
| 2041 | tatagttcta agtatccact ctggttcctc tttaggtctt aaacttcctt cttcctagtt |
| 2101 | gatggtaaat tcctgtgtaa ggcagtggcc tagcttttat tcaaagtgat agtgtaatgc |
| 2161 | cagaggctat tctgaatgtc actgaatagg caacactctc cctgaattct aagtccatgg |
| 2221 | tctgttcaag ggctttttag gacattggaa caccagtgaa ggcttagcta tgtcagaatt |
| 2281 | caatcttaaa atgcacttat aataagataa tattaaaaga gagcacatgg atctatacac |
| 2341 | cagactaact cggccataga atatgagtac aaaatgggca gtatgcagct gctgaactaa |
| 2401 | ggctgtggta gatacctttt caaagtttgc attcccagat ttttaaacca aggatcgttt |
| 2461 | cctaactcta ataggcagca aaacgtaagc aggtctctaa caaaaacata acagtagatt |
| 2521 | ccttatctaa attaggatct acacaattag ttaattgaca agaattacaa tgaatataaa |
| 2581 | aagacttgcc aagattggcg atcttaactc ttaaaattat ctaacaatga gcatataggt |
| 2641 | aaggtacaca aactttcata gctataagga gctgacctga aaggccaaaa acagtgtctc |
| 2701 | tgacaaaagc atcttgtaca ttctctgtac cagtcttttt gcctcatgag tcagcttttt |
| 2761 | tagttgtttt tattttaagt tggcaccagg ttggtactcc ttgctgcagc ccatggcgga |
| 2821 | gatacgaagt ttctttatct gtttgtaagt ggctgctctc tgatttctct tcttttgtat |
| 2881 | actcaacata gctttctggt caccactgtc agggcactca caggtcacag gtcagcctgt |
| 2941 | cacattggaa gctagcatgc tcttgtagca ttctgtggaa aaaacagaaa cattctccct |
| 3001 | tttccccata ttaagtatct gaacaggatc atggcaagtg ccaataagtg gatccttttt |
| 3061 | atctgtccta gacatcatta tatctagttt gttttttttt tgtaaataaa aatgtgattt |
| 3121 | tatgtgcaca gggatataat tcctaccttc tttgttttta aagaaggtat agtttttaaa |
| 3181 | gttttacaat accttgtctt tgagaattat aaaatatctc agtaacatgt gtaacattaa |
| 3241 | attgttaaca aaacatctct tggaggtttt gaaaataaaa attttgaagc |

SEQ ID NO: 64 Mouse CD84 Isoform 1 Amino Acid Sequence (NP_038517.1)

| | |
|---|---|
| 1 | maqrhlwiwf lclqtwseaa gkdadpvvmn gilgesvtfl lniqepkkid niawtsqssv |
| 61 | afikpgvnka evtitqgtyk grieiidqky dlvirdlrme dagtykadin eeneetitki |
| 121 | yylhiyrrlk tpkitqslis slnntcnitl tcsvekeekd vtyswepfge ksnvlqivhs |
| 181 | pmdqkltytc taqnpvsnss dsvtvqqpct dtpsfhprha vlpgglavlf llilipmlaf |
| 241 | lfrlykrrrd rivleaddvs kktvyavvsr naqptesriy deipqskmls ckkdpvttiy |
| 301 | ssvqlsekmk etnmkdrslp kalgneivv |

SEQ ID NO: 65 Mouse CD84 Transcript Variant 2 CDNA Sequence
(NM_001252472.1; CDS: 180-602)

| | |
|---|---|
| 1 | agtgcttgga gttcctctgt gactgaccac ttcttccttt tctgtctaat ggtgaacacc |
| 61 | tttctggacc agctctggac cagaatctga tttatgctct gctccggccc caccacactg |
| 121 | aagtgaaagc agctaccaca ccagttattt ttcctcagaa gactggagtc tgactggaca |
| 181 | tggcccagcg ccatctgtgg atctggttcc tttgcctaca aacctggtct gaagcagcag |
| 241 | gaaaagatgc agacccggtg gtaatgaatg ggattcttgg ggagtcagtt actttcctct |
| 301 | taaatattca agaaccaaag aaaattgaca acattgcctg gacttctcaa tcatctgttg |
| 361 | cttttataaa accaggagtc aataaagctg aagttaccat aacccagggc acttataaag |
| 421 | gacgaataga aatcatagat cagaagtatg acctggtcat tagagacctg aggatggaag |
| 481 | atgcaggaac ttacaaagca gacatcaatg aagagaatga ggaaaccatc accaagatct |
| 541 | actaccttca tatctaccgt aagttatggc agcacggggc cttggattta cttttgattt |
| 601 | gaagatttat gatctaaacc acacccatat ttctgataac agagtttcct aactcttctt |
| 661 | atccttataa ttacataagc acatcagtac ttataaaggt ctaactttac ttctggcctt |
| 721 | gacagacttt agctgtaatc tgttttgcag cagaatttgt cctctgttct ttgttttcct |
| 781 | ttcctataaa atgtcaataa tcatattaat caatttgtaa gcattattat gacattctag |
| 841 | taagaaacta tatgcagagt ggtctttata aggcttctgc ttttaagata attacagaat |
| 901 | gcataggcaa atgcaaagaa ctatgaaagg atgtgttctg tgcccttctc ttgccctctc |
| 961 | ctctgttata ctagatccaa actcttagtc tcatcccccg tcttatacag accttctggg |
| 1021 | gtagcctttc ttcattgtct ctcctgattc caaagagata aaataagcag atcctggcac |
| 1081 | acacctttga ttccagcact caggaggcaa agacagaagg atctctatga gttcaaggct |
| 1141 | agcttggtct tcagagaaag ttccagaaca gccaagacta acaaaaagaa accatttctc |
| 1201 | aaaccaacct cccatcccca tcctcacccc ccaaaaacta ctagaatgaa agaaaaaaaa |
| 1261 | ataccaagac acaaaatgaa cagtgtctga ggaactctta tttctgtaag tattaatact |
| 1321 | ttcagaaatg cagaacagtg ttcaaggtca aaaacagaaa attggaactt tcttggaatg |
| 1381 | tgccagcact tacttaggaa tggaatcact tatattccta tagaatttaa tcacatatat |
| 1441 | agcaccggac agcattaatc acatatatag caccggacat cataagcaag gtagtagtga |
| 1501 | agcaccatcc caacattttc ttgtctcagt tctgcagggc agagaactgt tagccctgac |
| 1561 | tccagctttt tctacctaac agttttgtgc aggtgacatc tcgtccttgc tgagaaaatg |
| 1621 | aaatgagatt tagttttcac cactatggct gtaccaatac ctaccccaac gggtggcaca |
| 1681 | cacacacaca cacacacaca cacacacaca cacacacaca cacacacgtc tctccgaaaa |
| 1741 | taggtaaata atgatacttt tcttgtgttt cggctatttt ggaatattca gagcctactg |
| 1801 | ttgtagaata gctgggataa aatggagaca tcctgcccag gctgttattg actgtgcttt |
| 1861 | tttgttggca tctaggcatc tgggactggg atgattataa atctaggtga tgatgtttgg |
| 1921 | atttgtcttt gttgggtggg tggcttgttc cttgttttct gtttcctctc tggattttca |
| 1981 | gagagtgtgg tagctctatg ttttagtagg acattttctt tggctctgac ttttatagcc |
| 2041 | actggaggtt ctcaataaaa gatgtttctg ggtattggga gctaacactt aggacctgtg |
| 2101 | ataggttagg agtatgaaag tgttcatagg agagagaaga agagtgttta gccaggatct |
| 2161 | gtttatttca tccccttgga atcagggaga cagtaaagtg aggtcaaccc acagggtctt |
| 2221 | ctctagatac tggggatgag actgggaagt tggatctaga ggaacagaag gaaacaggaa |
| 2281 | gatatacagg ctcctatctg cttctgggca ggaatgatct gggttagcag ggagtgcctg |
| 2341 | ctgaagatga gggctgggat aaaccaacaa gtggggagaa ggtgggtaga aagggaagat |
| 2401 | ctgtggaacc acaatagatg tgggattggg gatgtgcagg agtggggaca ttagaaggaa |
| 2461 | ggctgcagca ggtgttctgt tgcagagcta gggatgaagc tggagcttta gatttgtagg |
| 2521 | agaggaagcc ttctgttagc ttacatgttt cccaggcctg cttgggtggt gtgttcacaa |
| 2581 | ggaacactgg ttttggggac ttgtttactg gaatgaattg ggggaaggaa ggttggagta |
| 2641 | gaagatagag gtcctcaaag agaaaattaa taagtccaca aaatccaaac aaacagtgga |
| 2701 | aagaagtgaa taaactgtat aagacttgaa aatgaaaata aaatcaataa agaaaactaa |
| 2761 | aaccgagaga attctagaaa tgaadatttt aagaatttga acagaaatta cagaggtaaa |
| 2821 | cttcaccaac aaaatatgag agatggaaga gagaatatta ggcattgaag atacaataga |
| 2881 | gaaaatgaat atatcagtca aagaaaatgt taaaccaaaa aaaaaaagtc ctaacaaaaa |
| 2941 | atacaaaaaa tttaggacac taagaaaaga caaaacctaa gactaataga aatataggaa |
| 3001 | ggaaaagaat tctacctcaa aggcccagaa aatatttcaa caaaatcata gaagaaaaat |
| 3061 | tttctcacct aaagaagata gatgcctata aggtatatga agcatatata acaacaaata |
| 3121 | gatttaacaa gaaaataaac tctccttggc acataacagt caaatcacaa agcatacaga |
| 3181 | acaaagaaag aatattaaaa gctacaaggg gaaaaggcca agtagtatat aaatgcagac |
| 3241 | ctagaatgat acctgatttc tcagtgaaga ctctaaaggc caatagagtc tggacaaatg |
| 3301 | tgctataaac tctaagagac cccagaggtc atccctgatt actataccca ccaaaatatc |
| 3361 | caacatccta aatggaaaaa ataggatatt ccataataaa gccaaattta aacaatatct |
| 3421 | gtctacaaat ccatctatag aagatgacag ggcggaaaat tccaaccaaa agagtttaac |
| 3481 | tataccaaat aaaaacaaaa ggaataaaca atctcaaagc |

SEQ ID NO: 66 Mouse CD84 Isoform 2 Amino Acid Sequence (NP_001239401.1)

| | |
|---|---|
| 1 | maqrhlwiwf lclqtwseaa gkdadpvvmn gilgesvtfl lniqepkkid niawtsqssv |
| 61 | afikpgvnka evtitqgtyk grieiidqky dlvirdlrme dagtykadin eeneetitki |
| 121 | yylhiyrklw qhgaldllli |

SEQ ID NO: 67 Mouse CD84 Transcript Variant 3 cDNA Sequence
(NM_001289470.1; CDS: 180-1166)

| | |
|---|---|
| 1 | agtgcttgga gttcctctgt gactgaccac ttcttccttt tctgtctaat ggtgaacacc |
| 61 | tttctggacc agctctggac cagaatctga tttatgctct gctccggaaa caccacactg |
| 121 | aagtgaaagc agctaccaca ccagttattt ttcctcagaa gactggagtc tgactggaca |
| 181 | tggcccagcg ccatctgtgg atctggttcc tttgcctaca aacctggtct gaagcagcag |
| 241 | gaaaagatgc agacccggtg gtaatgaatg ggattcttgg ggagtcagtt actttcctct |
| 301 | taaatattca agaaccaaag aaaattgaca acattgcctg gacttctcaa tcatctgttg |
| 361 | cttttataaa accaggagtc aataaagctg aagttaccat aacccagggc acttataaag |
| 421 | gacgaataga aatcatagat cagaagtatg acctggtcat tagagacctg aggatggaag |
| 481 | atgcaggaac ttacaaagca gacatcaatg aagagaatga ggaaaccatc accaagatct |
| 541 | actaccttca tatctaccgt cgacttaaaa caccaaaaat tacacagagt ttgatatcat |
| 601 | ctttgaacaa tacctgtaat atcacactga catgctctgt ggaaaaggaa gaaaaggatg |
| 661 | tcacatatag ctggagtccc tttggagaga aaagcaatgt ccttcaaatc gtccactccc |
| 721 | ccatggacca aaaactgacc tacacatgta cagcccagaa ccctgtcagc aacagttctg |
| 781 | actctgtcac tgtccagcag ccatgtacag acactccaag cttccatcct cgccatgctg |
| 841 | tgttgccagg aggattggcc gtgctctttc tgcttattct cattccgatg ttggcatttc |
| 901 | tgttccgttt gtataagaga aggcgagaca ggattgtcct ggaagatgat gtctcaaaga |
| 961 | aaacagtata tgctgtagtt tcaagaaatg ctcaacccac agagtccaga atctatgatg |
| 1021 | aaatccctca gtccaagatg ctgtcctgta agaaagatcc ggtgaccacc atttattcct |
| 1081 | cagtgcagct ttctgagaag atgaaggaaa ccaacatgaa ggacagaagt ctgcctaagg |
| 1141 | ctttgggtaa tgaaattgtt gtctaggtga ttctctaaga ccacgaagga cacaaggaca |
| 1201 | agtcatctat gaggattgaa tcaacggttt cagtcttttg gatataacct gggccagcca |
| 1261 | agggatttag gaatgaagca agctccgtgg gtagaggtct gatccccagt gtgtaatgtt |
| 1321 | aggggccatg tacaggattg actctcaggc ccacagatct ttacccagag aaaccctgac |
| 1381 | ctgctcccat gctgtttttc ctggggaaag gaccctaggg cactcaacct ttatgcaatc |
| 1441 | agacatgcct ctcagagact gtctaacagc ttccagacta atctctgtgc agtacttagt |
| 1501 | cttacaactc tcacgggcaa cggcttcaag ttccaatttt acgatgtgtc tagcctggga |
| 1561 | tgactgttta gtttctaatg tggcgagaat gtatgttacc atgtaggaag cacagactat |
| 1621 | ggcaatctat aaatgatttg tggcatgaga ctgatgtccg aatttagggg aaggggaatg |
| 1681 | gtcttactta ggcattttat ggaaattgag tctctctccc cgagaagagg gtgatgaagc |
| 1741 | agcatccacg tctgcctctt ctccagtaac ctgcttgtta tcgacaatgt ccagccgatg |
| 1801 | gtaatgaact gaaacaaatg cgcttgaaag agatgaatca atttgagatt taacaaatcg |
| 1861 | ggtcaatttc tgaaatgccc aaggaccgaa ggagatcaat aataggagtc ccaatagggg |
| 1921 | ccctaaaagg gagggcaaca aggttgaaag tcagggggag gttgaaaacc agttttggta |
| 1981 | gtctaccttc cccctaggcc attgtaaata cttgtgtatg ggtgtaactc agctatctat |
| 2041 | agttctaagt atccactctg gttcctcttt aggtcttaaa cttccttctt cctagttgat |
| 2101 | ggtaaattcc tgtgtaaggc agtggcctag cttttattca aagtgatagt gtaatgccag |
| 2161 | aggctattct gaatgtcact gaataggcaa cactctccct gaattctaag tccatggtct |
| 2221 | gttcaagggc tttttaggac attggaacac cagtgaaggc ttagctatgt cagaattcaa |
| 2281 | tcttaaaatg cacttataat aagataatat taaaagagag cacatggatc tatacaccag |
| 2341 | actaactcgg gaatagaata tgagtacaaa atgggcagta tgcagctgct gaactaaggc |
| 2401 | tgtggtagat accttttcaa agtttgcatt cccagatttt taaaccaagg atcgttttct |
| 2461 | aactctaata ggcagcaaaa cgtaagcagg tctctaacaa aaacataaca gtagattcct |
| 2521 | tatctaaatt aggatctaca caattagtta attgacaaga attacaatga atataaaaag |
| 2581 | acttgccaag attggcgatc ttaactctta aaattatcta acaataagca tataggtaag |
| 2641 | gtacacaaac tttcatagct ataaggagct gacctccaag gccaaaaaca gtgtctctga |
| 2701 | caaaagcatc ttgtacattc tctgtaccag tctttttgcc tcatgagtca gcttttttag |
| 2761 | ttgtttttat tttaagttgg caccaggttg gtactccttg ctgcagccca tggcggagat |
| 2821 | acgaagtttc tttatctgtt tgtaagtggc tgctctctga tttctcttct tttgtatact |
| 2881 | caacatagct ttctggtcac cactgtcagg gcactcacag gtcacaggtc agcctgtcac |
| 2941 | attggaagct agcatgctct tgtagcattc tgtggaaaaa acagaaacat tctccctttt |
| 3001 | ccccatatta agtatctgaa caggatcatg gcaagtgcca ataagtggat cctttttatc |
| 3061 | tgtcctagac atcattatat ctagtttgtt ttttttttgt aaataaaaat gtgattttat |
| 3121 | gtgcacaggg atataattcc taccttcttt gtttttaaag aaggtatagt ttttaaagtt |
| 3181 | ttacaatacc ttgtctttga ccattataaa atatctcagt aacatgtgta acattaaatt |
| 3241 | gttaacaaaa catctcttgg aggttttgaa aataaaaatt ttccagc |

SEQ ID No: 68 Mouse CD84 Isoform 3 Amino Acid Sequence (NP_001276399.1)

| | |
|---|---|
| 1 | maqrhlwiwf lclqtwseaa gkdadpvvmn gilgesvtfl lniqepkkid niawtsqssv |
| 61 | afikpgvnka evtitqgtyk grieiidqky dlvirdirme dagtvkadin eeneetitki |
| 121 | yylhiyttlk tpkitqslis slnntcnitl tcsvekeekd vtyswspfge ksnvlqivhs |
| 181 | pmdqkltytc taqnpvsnss dsvtvqqpct dtpsfhprha vlpgglavlf llilipmlaf |
| 241 | lfrlykrrrd rivleddvsk ktvyavvsrn aqptesriyd eipqskmlsc kkdpvttiys |
| 301 | svqisekmke tnmkdrslpk algneivv |

SEQ ID NO: 69 Human IGSF6 Sequence (NM_005849.3; CDS: 69-794)

| | |
|---|---|
| 1 | ccttctgaaa aaagaaagcc aactttcctt tcaaatacac accccaaccc gccccggcat |
| 61 | acacagaaat ggggactgcg agcagaagca acatcgctcg ccatctgcaa accaatctca |
| 121 | ttctattttg tgtcggtgct gtgggcgcct gtactctctc tgtcacacaa ccgtggtacc |
| 181 | tagaagtgga ctacactcat gaggccgtca ccataaagtg taccttctcc gcaaccggat |
| 241 | gcccttctga gcaaccaaca tgcctgtggt ttcgctacgg tgctcaccag cctgagaacc |
| 301 | tgtgcttgga cgggtgcaaa agtgaggcag acaagttcac agtgagggag gccctcaaag |
| 361 | aaaaccaagt ttccctcact gtaaacagag tgacttcaaa tgacagtgca atttacatct |
| 421 | gtggaatagc attccccagt gtgccggaag cgagagctaa acagacagga ggagggacca |
| 481 | cactggtggt aagagaaatt aagctgctca gcaaggaact gcggagcttc ctgacagctc |
| 541 | ttgtatcact gctctctgtc tatgtgaccg gtgtgtgcgt ggccttcata ctcctctcca |
| 601 | aatcaaaatc caaccctcta agaaacaaag aaataaaaga agactcacaa aagaagaaga |
| 661 | gtgctcggcg tatttttcag gaaattgctc aagaactata ccataagaga catgtggaaa |
| 721 | caaatcagca atctgagaaa gataacaaca cttatgaaaa cagaagagta ctttccaact |
| 781 | atgaaaggcc atagaaacgt tttaattttc aatgaagtca ctgaaaatcc aactccagga |
| 841 | gctatggcag tgttaatgaa catatatcat caggtcttaa aaaaaaataa aggtaaactg |
| 901 | aaaagacaac tggctacaaa gaaggatgtc agaatgtaag gaaactataa ctaatagtca |
| 961 | ttaccaaaat actaaaaccc aacaaaatgc aactgaaaaa taccttccaa atttgccaag |
| 1021 | aaaaaaaatt ctattttaaa cttgaaaaaa aaaaaaaaaa aa |

SEQ ID NO: 70 Human IGSF6 Amino Acid Sequence (NP_005840.2)

| | |
|---|---|
| 1 | mgtasrsnia rhlqtnlilf cvgavgactl svtqpwylev dytheavtik ctfsatgcps |
| 61 | eqptclwfry gahqpenlcl dgckseadkf tvrealkenq vsltvnrvts ndsaiyicgi |
| 121 | afpsvpeara kqtgggttlv vreikllske lrsfltalvs llsvyvtgvc vafillsksk |
| 181 | snplrnkeik edsqkkksar rifqeiaqel yhkrhvetnq qsekdnntye nrrvlsnyer |
| 241 | p |

SEQ ID NO: 71 Mouse IGSF6 cDNA Sequence (NM_030691.1)

| | |
|---|---|
| 1 | ggagaaggcg gcacatgcag cagagatggg ccccgtgagt gcacgcagga gccgcctccg |
| 61 | gccagagatc agcctgatcc ttttccaagt cggtatggtg ggtgcctgca ctgtgtatgt |
| 121 | gctgcaacca ggttacctag aagtggacta cggttctgac gccgtcacca tggagtgtaa |
| 181 | cttttctaca gttggatgcc ctccagtgcc accaaagagc ttgtggtttc gctgtggtac |
| 241 | tcaccagcct gaagctctgt gcttggatgg atgcagaaat gaggcagaca agttcacagt |
| 301 | gaaagaaacc ctggacccgg accaagtctt cctcactgtt aacaggctgt ctccaaatga |
| 361 | cagtgcaatt tacatctgtg gaatagcatt tcccaatgaa ctgtcagcaa gcgctaaaca |
| 421 | cgttggaaag gggactacac tggtggtaag agaaagactt ttcagcaagg aggtgcgcag |
| 481 | tttcctgata gtgctcttag ctctgctctc tgtctacatc accggtgtgt gtgtgacctt |
| 541 | catagtcctc ttcaaatcaa aatctaacgg tccaagaagc agagaaacca aaggctcaaa |
| 601 | aaagaagagt gctcggcgta tctttcagga aattgctcaa gaattatacc ataagagata |
| 661 | tgtggaaaca agtcatctac ctgagcaaga gggcactgat gaaaacagaa aagcactccc |
| 721 | caaccctgga agagcataga tgtgcttgct ttttacttaa gccactgaca gtgcaactcc |
| 781 | agaatctacg gcaatgtgaa tggacataca gcaatcaaga caacatcaaa gagagctggg |
| 841 | gtatagctca gctggcagag tgcttgccta gtaggcacaa agccctagct ttgatcccca |
| 901 | gcaccacata aactcatcaa agtgaaacaa gcctgtattc ccaacattgt gaagtataaa |
| 961 | gagtcaccag ttcaaggtca tccctgagta taggattaac ctccagtcag agacacatca |
| 1021 | tcttgtctca aaagcaaccg tgaccaccaa aagaaaagga caggacaagt gggaaaacag |
| 1081 | ccggcctcgc cagacggcag agcataagta gctgtcacta attgtagcta cagaatatga |
| 1141 | aaacctcaag aaaactcaac tggaggacct tttttctaat tttccaagaa tagtctaaaa |
| 1201 | agccccactt tgaagaaaaa acttcatctt aacagttttt aaaaactgtt accatgttta |
| 1261 | tgttgtcagt ctacccaaca tactagatgt gtgataggca ttaactgaga gaaggcttca |
| 1321 | agttaaacca cagatctcag ttctgagggg aaataaatac tttcctgagt tgtaaaaatg |
| 1381 | atgaaacaat tagaatcaag tgagaagggc aaaaggagta aggagaagag caatttctga |
| 1441 | gtaagagaaa ctcattgtga acagtatctt ggaacaaaag tgatttcttc tgatactgta |
| 1501 | acggagcagt gggcagtgaa cattctccag ctgaggtata ggaaacaact tgggttgtac |
| 1561 | caccaacaaa acaatactac aagagaccag aggacgacta taaacaggaa acccaaagcc |
| 1621 | tatcagaaat gcctcaggaa tgcagacaac tgactctaga tgtcagtgtg gtaccaaaga |
| 1681 | actgcagccc tagtgagctt gaaaggaggg tcggatacaa caagggcctc actatctcac |
| 1741 | taaggtgacc tgagccaggc atgctggcac acacctttaa tcctaacact aaggaggcag |
| 1801 | aggcaggtga atttctgagt tcaaggccag cctgatctat agatcgagtt ccaggacagc |
| 1861 | cagggctgtt aacagaaaaa cactgtctca gaaaaaaagg gagtgggggc ttgacatgga |
| 1921 | ttgttctttg aatataagta ccaacaagga cacactgctc actaacttga tcacaggtct |
| 1981 | agtacagttg cttctaaaca ggtactaaat ataaatggca cacactctta aacatcacac |
| 2041 | actgtgatac acacatacac acacacacac acacacacac acaggtttga aatttacata |
| 2101 | cacaaaagga ataaaataat ggcatacaca gta |

SEQ ID NO: 72 Mouse IGSF6 Amino Acid Sequence (NP_109616.1)

| | |
|---|---|
| 1 | mgpvsarrsr lrpeislilf qvgmvgactv yvlqpgylev dygsdavtme cnfstvgcpp |
| 61 | vppkslwfrc gthqpealcl dgcrneadkf tvketldpdq vfltvnrlsp ndsaiyicgi |
| 121 | afpnelspsa khvgkgttlv vrerlfskev rsflivllal lsvyitgvcv tfivlfksks |
| 181 | ngprsretkg skkksarrif geiaqelyhk ryvetshlpe qegtdenrka lpnpgra |

SEQ ID NO: 73 Human CD48 Transcript Variant 1 cDNA Sequence (NM_001778.3;
CDS: 89-820)

| | |
|---|---|
| 1 | gtttggtaag ttccgttttt agccccggcc tttttctagc caggctctca actgtctcct |
| 61 | gcgttgctgg gaagttctgg aaggaagcat gtgctccaga ggttgggatt cgtgtctggc |
| 121 | tctggaattg ctactgctgc ctctgtcact cctggtgacc agcattcaag gtcacttggt |
| 181 | acatatgacc gtggtctcgg gcagcaacgt gactctgaac atctctgaga gcctgcctga |
| 241 | gaactacaaa caactaacct ggttttatac tttcgaccag aagattgtag aatgggattc |
| 301 | cagaaaatct aagtactttg aatccaaatt taaaggcagg gtcagacttg atcctcagag |
| 361 | tggcgcactg tacatctcta aggtccagaa agaggacaac agcacctaca tcatgagggt |
| 421 | gttgaaaaag actgggaatg agcaagaatg gaagatcaag ctgcaagtgc ttgaccctgt |
| 481 | acccaagcct gtcatcaaaa ttgagaagat agaagacatg gatgacaact gttatctgaa |
| 541 | actgtcatgt gtgatacctg gcgagtctgt aaactacacc tggtatgggg acaaaaggcc |
| 601 | cttcccaaag gagctccaga acagtgtgct tgaaaccacc cttatgccac ataattactc |
| 661 | caggtgttat acttgccaag tcagcaattc tgtgagcagc aagaatggca cggtctgcct |
| 721 | cagtccaccc tgtaccctgg cccggtcctt tggagtagaa tggattgcaa gttggctagt |
| 781 | ggtcacggtg cccaccattc ttggcctgtt acttacctga gatgagctct tttaactcaa |
| 841 | gcgaaacttc aaggccagaa gatcttgcct gttggtgatc atgctcctca ccaggacaga |
| 901 | gactgtatag gctgaccaga agcatgctgc tgaattatca acgaggattt tcaagttaac |
| 961 | ttttaaatac tggttattat ttaattttat atccctttgt tgttttctag tacacagaga |
| 1021 | tatagagata cacatgcttt tttcccaccc aaaattgtga caacattatg tgaatgtttt |
| 1081 | attatttttt aaaataaaca tttgatataa ttgtcaatta actgaaaaaa aaaaaaaaaa |
| 1141 | aaaaaaaaaa aaaaa |

SEQ ID NO: 74 Human CD48 Isoform 1 Amino Acid Sequence (NP_001769.2)

| | |
|---|---|
| 1 | mcsrgwdscl alellllpls llvtsiqghl vhmtvvsgsn vtlniseslp enykqltwfy |
| 61 | tfdqkivewd srkskyfesk fkgrvrldpq sgalyiskvq kednstyimr vlkktgneqe |
| 121 | wkiklqvldp vpkpvikiek iedmddncyl klscvipges vnytwygdkr pfpkelqnsv |
| 181 | lettlmphny srcytcqvsn sysskhgtvc lsppctlars fgvewiaswi vvtvptilgl |
| 241 | llt |

SEQ ID NO: 75 Human CD48 Transcript Variant 2 cDNA Sequence
(NM_001256030.1; CDS: 89-847)

| | |
|---|---|
| 1 | gtttggtaag ttccgttttt agccccggcc tttttctagc caggctctca actgtctcct |
| 61 | gcgttgctgg gaagttctgg aaggaagcat gtgctccaga ggttgggatt cgtgtctggc |
| 121 | tctggaattg ctactgctgc ctctgtcact cctggtgacc agcattcaag gtcacttggt |
| 181 | acatatgacc gtggtctccg gcagcaacgt gactctgaac atctctgaga gcctgcctga |
| 241 | gaactacaaa caactaacct ggttttatac tttcgaccag aagattgtag aatgggattc |
| 301 | cagaaaatct aagtactttg aatccaaatt taaaggcagg gtcagacttg atcctcagag |
| 361 | tggcgcactg tacatctcta aggtccagaa agaggacaac agcacctaca tcatgagggt |
| 421 | gttgaaaaag actgggaatg agcaagaatg gaagatcaag ctgcaagtgc ttgaccctgt |
| 481 | acccaagcct gtcatcaaaa ttgagaagat agaagacatg gatgacaact gttatctgaa |
| 541 | actgtcatgt gtgatacctg gcgagtctgt aaactacacc tggtatgggg acaaaaggcc |
| 601 | cttcccaaag gagctccaga acagtgtgct tgaaaccacc cttatgccac ataattactc |
| 661 | caggtgttat acttgccaag tcagcaattc tgtgagcagc aagaatggca cggtctgcct |
| 721 | cagtccaccc tgtaccctgg gtaagaagga tccctgggag ctgagggggg cacagggtaa |
| 781 | ctggagttgt tttgaacaaa gaaaggctgg gggtcctatt cagcctcctt gcacagtgtg |
| 841 | gtggtgaatc cctaaggtgt ctgggagagc tgggagacgt gggttctgcc accagctcta |
| 901 | ccaccacctc ccagccagct tacctcaact tcgtgggggc tcagtgttct cacctgcaaa |
| 961 | ggacgtttgg gagagatctc tgatactcct cttccctctc ccgctctaac aaagcatagt |
| 1021 | cctaacatct gaggccaggg tcatcataga gtagactgaa acatcagggt gagcagggag |
| 1081 | aaggaagggc aagtgggcga gcagctgtct agaggggctt cattagacag ccgaagtcag |
| 1141 | ccaaggaaag agggaccgag gtcattagac cgccaaagtc agccagggaa agagggactg |
| 1201 | aggagacggg cctgagagag gccgtcgagg aggcgtgaga gcctgagcct caggcgaagc |
| 1261 | ttctcctccc cagcctgatg ttcctagatg aacttaggaa gccagattcc cctgtctcct |
| 1321 | gggaggatcc actcatgagt gtcacacctg gctctagatc aggcctacac tggtgctagc |
| 1381 | atgggacagc taaggccatg ggttttagag tcagtcatac ctggggtcac ttctaggact |
| 1441 | gtcacttact agctaaacaa gttacttagc ttccccaagt catgttattc ctaaataaag |
| 1501 | gacaaaataa cagttcctat aaaaaaaaaa aaaaaaa |

SEQ ID NO: 76 Human CD48 Isoform 2 Amino Acid Sequence (NP_001242959.1)

| | |
|---|---|
| 1 | mcsrgwdscl alellllpls llvtsiqghl vhmtvvsgsn vtlniseslp enykqltwfy |
| 61 | tfdqkivewd srkskyfesk fkgrvrldpq sgalyiskvq kednstyimr vlkktgneqe |
| 121 | wkiklqvldp vpkpvikiek iedmddncyl klscvipges vnytwygdkr pfpkelqnsv |
| 181 | lettlmphny srcytcqvsn svsskngtvc lsppctlgkk dpwelrgaqg nwscfeqrka |
| 241 | ggpiqppctv ww |

SEQ ID NO: 77 Mouse CD48 Transcript Variant 1 cDNA Sequence (NM_007649.5;
CDS: 103-825)

| | |
|---|---|
| 1 | atacgacttc cggttttggg ttttgcttcc tgattgaagg gcaggcgccc tgacttctct |
| 61 | tacagttgtc tccagtgttc tgggccagct tatctaagta ttatgtgctt cataaaacag |
| 121 | ggatggtgtc tggtcctgga actgctactg ctgcccttgg gaactggatt tcaaggtcat |
| 181 | tcaataccag atataaatgc caccaccggc agcaatgtaa ccctgaaaat ccataaggac |
| 241 | ccacttggac catataaacg tatcacctgg cttcatacta aaaatcagaa gattttagag |
| 301 | tacaactata atagtacaaa gacaatcttc gagtctgaat ttaaaggcag ggtttatctt |
| 361 | gaagaaaaca atggtgcact tcatatctct aatgtccgga aagaggacaa aggtacctac |
| 421 | tacatgagag tgctgcgtga aactgagaac gagttgaaga taaccctgga agtatttgat |
| 481 | cctgtgccca agcattccat agaaatcaat aagactgaag cgtcgactga ttcctgtcac |
| 541 | ctgaggctat cgtgtgaggt aaaggaccag catgttgact atacttggta tgagagctcg |
| 601 | ggacctttcc ccaaaaagag tccaggatat gtgctcgatc tcatcgtcac accacagaac |
| 661 | aagtctacat tttacacctg ccaagtcagc aatcctgtaa gcagcaagaa cgacacagtg |
| 721 | tacttcactc taccttgtga tctagccaga tcttctggag tatgttggac tgcaacttgg |
| 781 | ctagtggtca caacactcat cattcacagg atcctgttaa cctgacaaga actcttctca |
| 841 | cccaagaagg caacttggaa gcacagagtc ttgccttcat ccctagcagt gttcctagcc |
| 901 | agcgaagcaa ctctggctct attggacaaa ggaaaatgtg ttactgaacg tctgcgagag |
| 961 | tttgcatgca tgctctatga aacaagcaca ggaccttgta cagtgctcca ccactgacct |
| 1021 | gtgtgcccag tcctttacaa agatttcaaa tcaacctttt aaaaactgtg cataatatct |
| 1081 | aattttatat accatagttg tttcccaaca tatattaaag ataaatgcat tctttttacc |
| 1141 | aaaatgtgac tatattattt tcatgttttc atatctcttt ttaaaataaa ttcttttaaa |
| 1201 | aaact |

SEQ ID NO: 78 Mouse CD48 Isoform 1 Amino Acid Sequence (NP_031675.1)

| | |
|---|---|
| 1 | mcfikqgwcl vlellllplg tgfqghsipd inattgsnvt lkihkdplgp ykritwlhtk |
| 61 | nqkileynyn stktifesef kgrvyleenn galhisnvrk edkgtyymrv lretenelki |
| 121 | tlevfdpvpk psieinktea stdschlrls cevkdqhvdy twyessgpfp kkspgyvldl |
| 181 | ivtpqnkstf ytcqvsnpvs skndtvyftl pcdlarssgv cwtatwlvvt tliihrillt |

SEQ ID NO: 79 Mouse CD48 Transcript Variant 2 cDNA Sequence
(NM_001360767.1; CDS: 103-558)

| | |
|---|---|
| 1 | atacgacttc cggttttggg ttttgcttcc tgattgaagg gcaggcgccc tgacttctct |
| 61 | tacagttgtc tccagtgttc tggggaagct tctctaagta ttatgtgctt cataaaacag |
| 121 | ggatggtgtc tggtcctgga actgctactg ctgccattgg gaactggatt tcaaggtcat |
| 181 | tcaataccag atataaatgc caccaccggc agcaatgtaa ccctgaaaat ccataaggac |
| 241 | ccacttggac catataaacg tatcacctgg cttcatacta aaaatcagaa gattttagag |
| 301 | tacaactata atagtacaaa gacaatcttc gagtctgaat ttaaaggcag ggtttatctt |
| 361 | gaagaaaaca atggtgcact tcatatctct aatgtccgga aagaggacaa aggtacctac |
| 421 | tacatgagag tgctgcgtga aactgagaac gagttgaaga taaccctgga agtatttgcc |
| 481 | agatcttctg gagtatgttg gactgcaact tggctagtgg tcacaacact catcattcac |
| 541 | aggatcctgt taacctgaca agaactcttc tcacccaaga aggcaacttg gaagcacaga |
| 601 | gtcttgcctt catccctagc agtgttccta gccagcgaag caactctggc tctattggac |
| 661 | aaaggaaaat gtgttactga acgtctgcga gagtttgcat gcatgctcta tgaaacaagc |
| 721 | acaggacctt gtacagtgct ccaccactga cctgtgtgcc cagtccttta caaagatttc |
| 781 | aaatcaacct tttaaaaact gtgcataata tctaatttta tataccctag ttgtttccca |
| 841 | acatatatta aagataaatg cattcttttt accaaaatgt gactatatta ttttcatgtt |
| 901 | ttcatatctc tttttaaaat aaattctttt aaaaaact |

SEQ ID NO: 80 Mouse CD48 Isoform 2 Amino Acid Sequence (NP_001347696.1)

| | |
|---|---|
| 1 | mcfikqgwcl vlellllplg tgfqghsipd inattgsnvt lkihkdplgp ykritwlhtk |
| 61 | nqkileynyn stktifesef kgrvyleenn galhisnvrk edkgtyymrv lretenelki |
| 121 | tlevfarssg vcwtatwlvv ttliihrill t |

SEQ ID NO: 81 Human CD33 Transcript Variant 1 cDNA Sequence (NM_001772.3;
CDS: 41-4135)

| | |
|---|---|
| 1 | tctgctcaca caggaagccc tggaagctgc ttcctcagac atgccgctgc tgctactgct |
| 61 | gcccctgctg tgggcagggg ccctggctat ggatccaaat ttctggctgc aagtgcagga |
| 121 | gtcagtgacg gtacaggagg gtttgtgcgt cctcgtgccc tgcactttct tccatcccat |
| 181 | accctactac gacaagaact ccccagttca tggttactgg ttccgggaag gagccattat |
| 241 | atccagggac tctccagtgg ccacaaacaa gctagatcaa gaagtacagg aggagactca |
| 301 | gggcagattc cgcctccttg gggatcccag taggaacaac tgctccctga gcatcgtaga |
| 361 | cgccaggagg agggataatg gttcatactt ctttcggatg gagagaggaa gtaccaaata |
| 421 | cagttacaaa tctccccagc tctctgtgca tgtgacagac ttgacccaca ggcccaaaat |
| 481 | cctcatccct ggcactctag aacccggcca ctccaaaaac ctgacctgct ctgtgtcctg |
| 541 | ggcctgtgag cagggaacac ccccgatctt ctcctggttg tcagctgccc ccacctccct |
| 601 | gggccccagg actactcact cctcggtgct cataatcacc ccacggcccc aggaccacgg |
| 661 | caccaacctg acctgtcagg tgaagttcgc tggagctggt gtgactacgg agagaaccat |
| 721 | ccagctcaac gtcacctatg ttccacagaa cccaacaact ggtatctttc caggagatgg |
| 781 | ctcagggaaa caagagacca gagcaggagt ggttcatggg gccattggag gagctggtgt |
| 841 | tacagccctg ctcgctcttt gtctctgcct catcttcttc atagtgaaga cccacaggag |
| 901 | gaaagcagcc aggacagcag tgggcaggaa tgacacccac cctaccacag ggtcagcctc |
| 961 | cccgaaacac cagaagaagt ccaagttaca tggccccact gaaacctcaa gctgttcagg |
| 1021 | tgccgcccct actgtggaga tggatgagga gctgcattat gcttccctca actttcatgg |
| 1081 | gatgaatcct tccaaggaca cctccaccga atactcagag gtcaggaccc agtgaggaac |
| 1141 | ccacaagagc atcaggctca gctagaagat ccacatcctc tacaggtcgg ggaccaaagg |
| 1201 | ctgattcttg gagatttaac accccacagg caatgggttt atagacatta tgtgagtttc |
| 1261 | ctgctatatt aacatcatct tagactttgc aagcagagag tcgtggaatc aaatctgtgc |
| 1321 | tctttcattt gctaagtgta tgatgtcaca caagctcctt aaccttccat gtctccattt |
| 1381 | tcttctctgt gaagtaggta taagaagtcc tatctcatag ggatgctgtg agcattaaat |
| 1441 | aaaggtacac atggaaaaca ccagtc |

SEQ ID NO: 82 Human CD33 Isoform 1 Amino Acid Sequence (NP_001763.3)

| | |
|---|---|
| 1 | mplllllpll wagalamdpn fwlqvqesvt vqeglcvlvp ctffhpipyy dknspvhgyw |
| 61 | fregaiisrd spvatnkldq evqeetqgrf rllgdpsrnn cslsivdarr rdngsyffrm |
| 121 | ergstkysyk spqlsvhvtd lthrpkilip gtlepghskn ltcsvswace qgtppifswl |
| 181 | saaptslgpr tthssvliit prpqdhgtnl tcqvkfagag vttertiqln vtyvpqnptt |
| 241 | gifpgdgsgk qetragvvhg aiggagvtal lalclcliff ivkthrrkaa rtavgrndth |
| 301 | pttgsaspkh qkksklhgpt etsscsgaap tvemdeelhy aslnfhgmnp skdtstevse |
| 361 | vrtq |

SEQ ID NO: 83 Human CD33 Transcript Variant 2 cDNA Sequence
(NM_001082618.1; CDS: 41-754)

| | |
|---|---|
| 1 | tctgctcaca caggaagccc tggaagctgc ttcctcagac atgccgctgc tgctactgct |
| 61 | gcccctgctg tgggcagact tgacccacag gcccaaaatc ctcatccctg gcactctaga |
| 121 | acccggccac tccaaaaacc tgacctgctc tgtgtcctgg gcctgtgagc agggaacacc |
| 181 | cccgatcttc tcctggttgt cagctgcccc cacctccctg ggccccagga ctactcactc |
| 241 | ctcggtgctc ataatcaccc cacggcccca ggaccacggc accaacctga cctgtcaggt |
| 301 | gaagttcgct ggagctggtg tgactacgga gagaaccatc cagctcaacg tcacctatgt |
| 361 | tccacagaac ccaacaactg gtatctttcc aggagatggc tcagggaaac aagagaccag |
| 421 | agcaggagtg gttcatgggg ccattggagg agctggtgtt acagccctgc tcgctctttg |
| 481 | tctctgcctc atcttcttca tagtgaagac ccacaggagg aaagcagcca ggacagcagt |
| 541 | gggcagccat gacacccacc ctaccacagg gtcagcctcc ccgaaacacc agaagaagtc |
| 601 | caagttacat ggccccactg aaacctcaag ctgttcaggt gccgccccta ctgtggagat |
| 661 | ggatgaggag ctgcattatg cttccctcaa ctttcatggg atgaatcctt ccaaggacac |
| 721 | ctccaccgaa tactcagagg tcaggaccca gtgaggaacc cacaagagca tcaggctcag |
| 781 | ctagaagatc cacatcctct acaggtcggg gaccaaaggc tgattcttgg agatttaaca |
| 841 | ccccacaggc aatgggttta tagacattat gtgagtttcc tgctatatta acatcatctt |
| 901 | agactttgca agcagagagt cgtggaatca aatctgtgct ctttcatttg ctaagtgtat |
| 961 | gatgtcacac aagctcctta accttccatg tctccatttt cttctctgtg aagtaggtat |
| 1021 | aagaagtcct atctcatagg gatgctgtga gcattaaata aaggtacaca tggaaaacac |
| 1081 | cagtc |

SEQ ID NO. 84 Human CD33 Isoform 2 Amino Acid Sequence (NP_001076087.1)

| | |
|---|---|
| 1 | mplllllpll wadlthrpki lipgtlepgh shnltcsvsw aceqgtppif swlsaaptsl |
| 61 | gprtthssvl iitprpqdhg tnltcqvkfa gagvtterti qlnvtyvpqn pttgifpgdg |
| 121 | sgkqetragv vhgaiggagv tallalclcl iffivkthrr kaartavgrn dthpttgsas |
| 181 | pkhqkksklh gptetsscsg aaptvemdee lhyaslnfhg mnpskdtste ysevrtq |

SEQ ID NO: 85 Human CD33 Transcript Variant 3 cDNA Sequence
(NM_001177608.1; CDS: 41-973)

| | |
|---|---|
| 1 | tatgctcaca caggaagccc tggaagctgc ttcctcagac atgccgctgc tgctactgct |
| 61 | gcccctgctg tgggcagggg ccctggctat ggatccaaat ttctggctgc aagtgcagga |
| 121 | gtcagtgacg gtacaggagg gtttgtgcgt cctcgtgccc tgcactttct tccatcccat |
| 181 | accctactac gacaagaact ccccagttca tggttactgg ttccgggaag gagccattat |
| 241 | atccagggac tctccagtgg ccacaaacaa gctagatcaa gaagtacagg aggagactca |
| 301 | gggcagattc cgcctccttg gggatcccag taggaacaac tgctccctga gcatcgtaga |
| 361 | cgccaggagg agggataatg gttcatactt ctttcggatg gagagaggaa gtaccaaata |
| 421 | cagttacaaa tctccccagc tctctgtgca tgtgacagac ttgacccaca ggcccaaaat |
| 481 | cctcatccct ggcactctag aacccggcca ctccaaaaac ctgacctgct ctgtgtcctg |
| 541 | ggcctgtgag cagggaacac ccccgatctt ctcctggttg tcagctgccc ccacctccct |
| 601 | gggccccagg actactcact cctcggtgct cataatcacc ccacggcccc aggaccacgg |
| 661 | caccaacctg acctgtcagg tgaagttcgc tggagctggt gtgactacgg agagaaccat |
| 721 | ccagctcaac gtcacctatg ttccacagaa cccaacaact ggtatctttc caggagatgg |
| 781 | ctcagggaaa caagagacca gagcaggagt ggttcatggg gccattggag gagctggtgt |
| 841 | tacagccctg ctcgctattt gtctctgcct catcttcttc atagtgaaga cccacaggag |
| 901 | gaaagcagcc aggacagcag tgggcaggaa tgacacccac cctaccacag ggtcagcctc |
| 961 | cccggtacgt tgaggccaac agatcaggag atgatggcca ttgaaaagat agtttcttgg |
| 1021 | ccgggcacag tgtttcacac ctgcaatccc agcacctttg gaggccaagg cgggcggatc |
| 1081 | acgaggtcag gagattgaga ctatcctg |

SEQ ID NO: 86 Human CD33 Isoform 3 Amino Acid Sequence (NP_001171079.1)

| | |
|---|---|
| 1 | mplllllpll wagalamdpn fwlqvqesvt vqeglcvlvp ctffhpipyy dknspvhgyw |
| 61 | fregaiisrd spvatnkldg evqeetqgrf rllgdpsrnn cslsivdarr rdngsyffrm |
| 121 | ergstkysyk spqlsvhvtd lthrpkilip gtlepghskn ltcsvswace qgtppifswl |
| 181 | saaptslgpr tthssvliit prpqdhgtnl tcqvkfagag vttertiqln vtyvpqnptt |
| 241 | gifpgdgsgk qetragvvhg aiggagvtal lalclcliff ivkthrrkaa rtavgrndth |
| 301 | pttgsaspvr |

SEQ ID NO: 87 Human LST1 Transcript Variant 1 cDNA Sequence (NM_007161.3;
CDS: 101-415)

| | |
|---|---|
| 1 | atgaggaact tgaggcaagt caccagcccc tgatcatttc gcctaaaaga gcaaggacta |
| 61 | gagttcctga cctccaggcc agtccctgat ccctgaccta atgttatcgc ggaatgatga |
| 121 | tatatgtatc tacgggggcc tggggctggg cgggctcctg cttctggcag tggtccttct |
| 181 | gtccgcctgc ctgtgttggc tgcatcgaag agtaaagagg ctggagagga gctggcacct |
| 241 | tctgtcgtgg tccgaggccc agggctcctc agagcaggaa ctccactatg catctctgca |
| 301 | gaggctgcca gtgcccagca gtgagggacc tgacctcagg ggcagagaca agagaggcac |
| 361 | caaggaggat ccaagagctg actatgcctg cattgctgag aacaaaccca cctgagcacc |
| 421 | ccagacacct tcctcaaccc aggcgggtgg acagggtccc cctgtggtcc agccagtaaa |
| 481 | aaccatggtc cccccacttc tgtgtctcag tcctctcagt ccatctcgag cctccgttca |
| 541 | aattgatcat catcaaaact tatgtggctt tttgaccttt gaatagggaa ttttttaaat |
| 601 | tttttaaaaa ttaaaataaa aaaaacacat ggctcaccct tccacccaaa aaa |

SEQ ID NO: 88 Human LST1 Isoform 1 Amino Acid Sequence (NP_009092.3)

| | |
|---|---|
| 1 | mlsrnddici ygglglggll llavvllsac lcwlhrrvkr lerswhllsw sqaqgsseqe |
| 61 | lhyaslqrlp vpssegpdlr grdkrgtked pradyaciae nkpt |

SEQ ID NO: 89 Human LST1 Transcript Variant 2 cDNA Sequence (NM_205837.2;
CDS: 210-410)

| | |
|---|---|
| 1 | acttcagccc tagcagcatc tgcctgtggg aagcagctct ccacaccagc caagggggcc |
| 61 | cccacactcc cgcgctgctc tgcggctcag ggagcagccc acctgctgga tgaggaactt |
| 121 | gaggcaagtc accagcccct gatcatttcg cctaaaagag caaggactag agttcctgac |
| 181 | ctccaggcca gtccctgatc cctgacctaa tgttatcgcg gaatgatgat atatgtatct |
| 241 | acgggggcct ggggctgggc gggctcctgc ttctggcagt ggtccttctg tccgcctgcc |
| 301 | tgtgttggct gcatcgaaga gcaccttctg tcctggtccc aggcccaggg ctcgtcagag |
| 361 | caggaactcc actatgcatc tctgcagagg ctgccagtgc ccagcagtga gggacctgac |
| 421 | ctcaggggca gagacaagag aggcaccaag gaggatccaa gagctgacta tgcctgcatt |
| 481 | gctgagaaca aacccacctg agcaccccag acaccttcct caacccaggc gggtggacag |
| 541 | ggtccccctg tggtccagcc agtaaaaacc atggtccccc cacttctgtg tctcagtcct |
| 601 | ctcagtccat ctcgagcctc cgttcaaatt gatcatcatc aaaacttatg tggctttttg |
| 661 | acctttgaat agggaatttt ttaaattttt taaaaattaa aataaaaaaa acacatggct |
| 721 | cacccttcca cccaaaaaa |

SEQ ID NO: 90 Human LST1 Isoform 2 Amino Acid Sequence (NP_995309.2)

| | |
|---|---|
| 1 | mlsrnddici ygglglggll llavvllsac lcwlhrraps vlvpgpgllr agtplcisae |
| 61 | aasaqq |

SEQ ID NO: 91 Human LST1 Transcript Variant 3 cDNA Sequence (NM_205838.2;
CDS: 238-438)

| | |
|---|---|
| 1 | gctggggagg aacccaggct gggggagaag ttaaagccag aggaggggca ggaatgtctg |
| 61 | aggtggcaac acttctcttc agccagacag cactggccag tttggagtct gtccatcctg |
| 121 | caggccacaa gctctggatg aggaacttga ggcaagtcac cagcccctga tcatttcgcc |
| 181 | taaaagagca aggactagag ttcctgacct ccaggccagt ccctgatccc tgacctaatg |
| 241 | ttatcgcgga atgatgtaaa gaggctggag aggagctggg cccagggctc ctcagagcag |
| 301 | gaactccact atgcatctct gcagaggctg ccagtgccca gcagtgaggg acctgacctc |
| 361 | aggggcagag acaagagagg caccaaggag gatccaagag ctgactatgc ctgcattgct |
| 421 | gagaacaaac ccacctgagc accccagaca ccttcctcaa cccaggcggg tggacagggt |
| 481 | ccccctgtgg tccagccagt aaaaaccatg gtccccccac ttctgtgtct cagtcctctc |
| 541 | agtccatctc gagcctccgt tcaaattgat catcatcaaa acttatgtgg ctttttgacc |
| 601 | tttgaatagg gaatttttta aattttttaa aaattaaaat aaaaaaaaca catggctcac |
| 661 | ccttccaccc aaaaaa |

SEQ ID NO: 92 Human LST1 Isoform 3 Amino Acid Sequence (NP_995310.2)

| | |
|---|---|
| 1 | mlsrndvkrl erswaqgsse qelhyaslqr lpvpssegpd lrgrdkrgtk edpradyaci |
| 61 | aenkpt |

SEQ ID NO: 93 Human LST1 Transcript Variant 4 cDNA Sequence (NM_205839.2;
CDS: 238-531)

| | |
|---|---|
| 1 | gctggggagg aacccaggct gggggagaag ttaaagccag aggaggggca ggaatgtctg |
| 61 | aggtggcaac acttctcttc agccagacag cactggccag tttggagtct gtccatcctg |
| 121 | caggccacaa gctctggatg aggaacttga ggcaagtcac cagcccctga tcatttcgcc |
| 181 | taaaagagca aggactagag ttcctgacct ccaggccagt ccctgatccc tgacctaatg |
| 241 | ttatcgcgga atgatgatat atgtatctac gggggcctgg ggctgggcgg gctcctgctt |
| 301 | ctggcagtgg tccttctgtc cgcctgcctg tgttggctgc atcgaagagt aaagaggctg |
| 361 | gagaggagct gggcccaggg ctcctcagag caggaactcc actatgcatc tctgcagagg |
| 421 | ctgccagtgc ccagcagtga gggacctgac ctcaggggca gagacaagag aggcaccaag |
| 481 | gaggatccaa gagctgacta tgcctgcatt gctgagaaca aacccacctg agcaccccag |
| 541 | acaccttcct caacccaggc gggtggacag ggtccccctg tggtccagcc agtaaaaacc |
| 601 | atggtccccc cacttctgtg tctcagtcct ctcagtccat ctcgagcctc cgttcaaatt |
| 661 | gatcatcatc aaaacttatg tggctttttg acctttgaat agggaatttt ttaaattttt |
| 721 | taaaaattaa aataaaaaaa acacatggct cacccttcca cccaaaaaa |

SEQ ID NO: 94 Human LST1 Isoform 4 Amino Acid Sequence (NP_995311.2)

| | |
|---|---|
| 1 | mlsrnddici ygglglggal llavvllsac lcwlhrrvkr lerswaqqss eqelhyaslq |
| 61 | rlpvpssegp dlrgrdkrgt kedpradyac iaenkpt |

SEQ ID NO: 95 Human LST1 Transcript Variant 5 cDNA Sequence (NM_205840.2;
CDS: 101-280)

| | |
|---|---|
| 1 | atgaggaact tgaggcaagt caccagcccc tgatcatttc gcctaaaaga gcaaggacta |
| 61 | gagttcctga cctccaggcc agtccctgat ccctgaccta atgttatcgc ggaatgatga |
| 121 | tatatgtatc tacgggggcc tggggctggg cgggctcctg cttctggcag tggtccttct |
| 181 | gtccgcctgc ctgtgttggc tgcatcgaag aggcccaggg ctcctcagag caggaactcc |
| 241 | actatgcatc tctgcagagg ctgccagtgc ccagcagtga gggacctgac ctcaggggca |
| 301 | gagacaagag aggcaccaag gaggatccaa gagctgacta tgcctgcatt gctgagaaca |
| 361 | aacccacctg agcaccccag acaccttcct caacccaggc gggtggacag ggtccccctg |
| 421 | tggtccagcc agtaaaaacc atggtccccc cacttctgtg tctcagtcct ctcagtccat |
| 481 | ctcgagcctc cgttcaaatt gatcatcatc aaaacttatg tggctttttg acctttgaat |
| 541 | agggaatttt ttaaattttt taaaaattaa aataaaaaaa acacatggct cacccttcca |
| 601 | cccaaaaaa |

SEQ ID NO: 96 Human LST1 Isoform 5 Amino Acid Sequence (NP_995312.2)

| | |
|---|---|
| 1 | mlsrnddici ygglglggll llavvllsac lcwlhrrgpg llragtplci saeaasaqq |

SEQ ID NO: 97 Human LST1 Transcript Variant 6 cDNA Sequence
(NM_001166538.1; CDS: 101-322)

| | |
|---|---|
| 1 | atgaggaact tgaggcaagt caccagcccc tgatcatttg gcctaaaaga gcaaggacta |
| 61 | gagttcctga cctccaggcc agtcgctgat cgctgaccta atgttatcgc ggaatgatgt |
| 121 | aaagaggctg gagaggagct ggcaccttct gtcctggtcc caggcccagg gctcctcaga |
| 181 | gcaggaactc cactatgcat ctctgcagag gctgccagtg cccagcagtg agggacctga |
| 241 | cctcaggggc agagacaaga gaggcaccaa ggaggatcca agagctgact atgcctgcat |
| 301 | tgctgagaac aaacccacct gagcacccca gacaccttcc tcaacccagg cgggtggaca |
| 361 | gggtccccct gtggtccagc cagtaaaaac catggtcccc ccacttctgt gtctcagtgc |
| 421 | tctcagtcca tctcgagcct ccgttcaaat tgatcatcat caaaacttat gtggcttttt |
| 481 | gacctttgaa tagggaattt tttaaatttt ttaaaaatta aaataaaaaa aacacatggc |
| 541 | tcacccttcc acccaaaaaa |

SEQ ID NO: 98 Human LST1 Isoform 6 Amino Acid Sequence (NP_001160010.1)

| | |
|---|---|
| 1 | mlsrndvkrl erswhllsws qaqgsseqel hyaslqrlpv pssegpdlrg rdkrgtkedp |
| 61 | radyaciaen kpt |

SEQ ID NO: 99 Human TNFAIP8L2 cDNA Sequence (NM_024575.4; CDS: 127-681)

| | |
|---|---|
| 1 | ggccaagcca aagggctctc acactaagtg aagcttctcc attctgtaag ctttccggga |
| 61 | acatccaagg caagactggc acccagcaca gcagtgactg accacatacc ccactctcca |
| 121 | ggacccatgg agtccttcag ctcaaagagc ctggcactgc aagcagagaa gaagctactg |
| 181 | agtaagatgg cgggtcgctc tgtggctcat ctcttcatag atgagacaag cagtgaggtg |
| 241 | ctagatgagc tctaccgtgt gtccaaggag tacacgcaca gccggcccca ggcccagcgc |
| 301 | gtgatcaagg acctgatcaa agtggccatc aaggtggctg tgctgcaccg caatggctcc |
| 361 | tttggcccca gtgagctggc cctggctacc cgctttcgcc agaagctgcg gcagggtgcc |
| 421 | atgacggcac ttagctttgg tgaggtagac ttcaccttcg aggctgctgt tctggctggc |
| 481 | ctgctgaccg agtgccggga tgtgctgcta gagttggtgg aacaccacct cacgcccaag |
| 541 | tcacatggcc gcatccgcca cgtgtttgat cacttctctg acccaggtct gctcacggcc |
| 601 | ctctatgggc ctgacttcac tcagcacctt ggcaagatct gtgacggact caggaagctg |
| 661 | ctagacgaag ggaagctctg agagccctga gcctagcaca ttccaccttg acaaaatggt |
| 721 | tgactgagaa aacacagata atgggcttcc taaccctgct cacctggcac taacactttt |
| 781 | caatcttcag gcttcattcc ttcccaagag tgcttttgac tctgagacca gcccaccccc |
| 841 | aaacagctag tggagaagga gcaatgctga ggggtgaggc ctctctccca ctccagcccc |
| 901 | aggacaggaa acagaactgc ctgaaaaagg tgaagtgaaa cttggatctc tatttctccc |
| 961 | ataagggact tctgaaacag ggaagccccc tcccatgtga accaaggaaa ggaggcacag |
| 1021 | cccagagaac ccctttgggg atactaaaga cagaagaggg gaaggtggcc cttagagaca |
| 1081 | gagcttggac agatgccaga ggctctgttc cagagtgcag gaagaagggg ctagggcagg |
| 1141 | ggagattctc ataggggaaa taaaactact aaaatatgaa aaaaaaaaaa aaaaaaaaa |

SEQ ID NO: 100 Human TNFAIP8L2 Amino Acid Sequence (NP_078851.2)

| | |
|---|---|
| 1 | mesfssksla lqaekkllsk magrsvahlf idetssevld elyrvskeyt hsrpqaqrvi |
| 61 | kdlikvaikv avlhrngsfg pselalatrf rqklrqgamt alsfgevdft feaavlagll |
| 121 | tecrdvllel vehhltpksh grirhvfdhf sdpglltaly gpdftqhlgk icdglrklld |
| 181 | egkl |

SEQ ID NO: 101 Mouse TNFAIP8L2 cDNA Sequence (NM_027206.2; CDS: 93-647)

| | |
|---|---|
| 1 | gctctcagaa acatccaagg ccagactggc acccagcaca cggcagccgg ttgcctcttc |
| 61 | cagtgactga tcacacaccg accgcaagca ccatggagtc cttcagctca aagagtctgg |
| 121 | cactacaagc ggagaagaag ctgctgagta aaatggctgg tcggtccgtg gcgcatctct |
| 181 | ttatcgacga gaccagcagc gaggtgctag acgagcttta ccgcgtgtcc aaagaataca |
| 241 | cgcacagccg gcccaaggca cagcgggtga tcaaagacct catcaaggta gcggttaaag |
| 301 | tggctgtgct gcaccgcagt ggctgctttg gccctgggga gctggctctg gctacacgat |
| 361 | ttcgtcagaa gctacggcag ggcgccatga ccgcacttag cttcggtgag gtggacttca |
| 421 | cctttgaggc tgccgtgcta gcaggtctgc tcgtcgagtg ccgggacatt ctgctggagc |
| 481 | tggtggagca ccacctcaca cccaagtcac atgaccgcat caggcacgtg tttgatcact |
| 541 | actctgaccc cgacdtgctg gctgccctct atgggcctga cttcactcag caccttggca |
| 601 | agatctgtga tgggctccgg aagctgctgg acgagggcaa gctctgaagc tccggagctc |
| 661 | agcacactgg actttggcaa aatgactgac tgggaaatga cacatcgggc tctctaaccc |
| 721 | tgcaccaatg cttctcgatc ccctggcttc actctctccc aagcgtgcta tagacactga |
| 781 | ggccaccccc acccccaaac tactgctggg gcaaagcaag gctgaactga gtgaggcggc |
| 841 | tctcgctccc atccagttcc agtaaaggaa acagctgact gaagaagaag tgaaactcag |
| 901 | gtccgcttct cccgggaggg ctgcccagaa ccgggggatc ctcctcctcc acaaacccga |
| 961 | ggaaggggac actaaaggcc acacgcagga aggtggtcat tagagacctc ctggatctag |
| 1021 | agttggaggc agcactagga cacatacaga cgctgtgttc cagagcttct agaaggagct |
| 1081 | gggggaaggg aggcacaggg gaaataaaac cactaaagca tg |

SEQ ID NO: 102 Mouse TNFAIP8L2 Amino Acid Sequence (NP_081482.1)

| | |
|---|---|
| 1 | mesfssksla lqaekkllsk magrsvahlf idetssevld elyrvskeyt hsrpkaqrvi |
| 61 | kdlikvavkv avlhrsgcfg pgelalatrf rqklrqgamt alsfgevdft feaavlagll |
| 121 | vecrdillel vehhltpksh drirhvfdhy sdpdllaaly gpdftghlgk icdglrklld |
| 181 | egkl |

SEQ ID NO: 103 Human SPI1 Transcript Variant 1 cDNA Sequence
(NM_001080547.1; CDS: 224-1039)

| | |
|---|---|
| 1 | gactatctcc cagcggcagg cccttcgata aaatcaggaa cttgtgctgg ccctgcaatg |
| 61 | tcaagggagg gggctcaccc agggctcctg tagctcaggg ggcaggcctg agccctgcac |
| 121 | ccgccccacg accgtccagc ccctgacggg gcaccccatc ctgaggggct ctgcattggc |
| 181 | ccccaccgag gcaggggatc tgaccgactc ggagcccggc tggatgttac aggcgtgcaa |
| 241 | aatggaaggg tttcccctcg tcccccctca gccatcagaa gacctggtgc cctatgacac |
| 301 | ggatctatac caacgccaaa cgcacgagta ttacccctat ctcagcagtg atggggagag |
| 361 | ccatagcgac cattactggg acttccaccc ccaccacgtg cacagcgagt tcgagagctt |
| 421 | cgccgagaac aacttcacgg agctccagag cgtgcagccc ccgcagctgc agcagctcta |
| 481 | ccgccacatg gagctggagc agatgcacgt cctcgatacc cccatggtgc caccccatcc |
| 541 | cagtcttggc caccaggtct cctacctgcc ccggatgtgc ctccagtacc catccctgtc |
| 601 | cccagcccag cccagctcag atgaggagga gggcgagcgg cagagccccc cactggaggt |
| 661 | gtctgacggc gaggcggatg gcctggagcc cgggcctggg ctcctgcctg gggagacagg |
| 721 | cagcaagaag aagatccgcc tgtaccagtt cctgttggac ctgctccgca gcggcgacat |
| 781 | gaaggacagc atctggtggg tggacaagga caagggcacc ttccagttct cgtccaagca |
| 841 | caaggaggcg ctggcgcacc gctggggcat ccagaagggc aaccgcaaga agatgaccta |
| 901 | ccagaagatg gcgcgcgcgc tgcgcaacta cggcaagacg ggcgaggtca agaaggtgaa |
| 961 | gaagaagctc acctaccagt tcagcggcga agtgctgggc cgcgggggcc tggccgagcg |
| 1021 | gcgccacccg ccccactgag cccgcagccc ccgccgggcc ccgccaggcc tccccgctgg |
| 1081 | ccatagcatt aagccctcgc ccggcccgga cacagggagg acgctcccgg ggcccagagg |
| 1141 | caggactgtg gcgggccggg cctcgcctca cccgccccct ccccccactc caggccccct |
| 1201 | ccacatcccg cttcgcctcc ctccaggact ccacccrggc tccrggacgc cagctgggcg |
| 1261 | tcagacccca ccggggcaac cttgcagagg acgacccggg gtactgcctt gggagtctca |
| 1321 | agtccgtatg taaatcagat ctcccctctc acccctccca cccattaacc tcctcccaaa |
| 1381 | aaacaagtaa agttattctc aatccatcaa aaaaaaaaaa aaaaaa |

SEQ ID NO: 104 Human SPI1 Isoform 1 Amino Acid Sequence (NP_001074016.1)

| | |
|---|---|
| 1 | mlqackmegf plvppqpsed lvpydtdlyq rqtheyypyl ssdgeshsdh ywdfhphhvh |
| 61 | sefesfaenn ftelqsvgpp qlqqlyrhme leqmhvldtp mvpphpslgh qvsylprmcl |
| 121 | qypslspaqp ssdeeegerq spplevsdge adglepgpgl lpgetgskkk irlyqflldl |
| 181 | lrsgdmkdsi wwvdkdkgtf qfsskhkeal ahrwgiqkgn rkkmtyqkma ralrnygktg |
| 241 | evkkvkkklt yqfsgevlgr gglaerrhpp h |

SEQ ID NO: 105 Human SPI1 Transcript Variant 2 cDNA Sequence (NM_003120.2;
CDS: 224-1036)

| | |
|---|---|
| 1 | gactatctcc cagcggcagg cccttcgata aaatcaggaa cttgtgctgg ccctgcaatg |
| 61 | gggctcaccc agggctcctg tagctcaggg ggcaggcctg agccctgcac agccctgcac |
| 121 | ccgccccacg accgtccagc ccctgacggg gcaccccatc ctgaggggct ctgcattggc |
| 181 | ccccaccgag gcaggggatc tgaccgactc ggagcccggc tggatgttac aggcgtgcaa |
| 241 | aatggaaggg tttcccctcg tcccccctcc atcagaagac ctggtgccct atgacacgga |
| 301 | tctataccaa cgccaaacgd acgagtatta cccctatctc agcagtgatg gggagagcca |
| 361 | tagcgaccat tactgggact tccaccccca ccacgtgcac agcgagttcg agagcttcgc |
| 421 | cgagaacaac ttcacggagc tccagagcgt gcagcccccg cagctgcagc agctctaccg |
| 481 | ccacatggag ctggagcaga tgcacgtcct cgataccccc atggtgccac cccatcccag |
| 541 | tcttggccac caggtctcct acctgccccg gatgtgcctc cagtacccat ccctgtcccc |
| 601 | agcccagccc agctcagatg aggaggaggg cgagcggcag agccccccac tggaggtgtc |
| 661 | tgacggcgag gcggatggcc tggagcccgg gcctgggctc ctgcctgggg agacaggcag |
| 721 | caagaagaag atccgcctgt accagttcct gttggacctg ctccgcagcg gcgacatgaa |
| 781 | ggacagcatc tggtgggtgg acaaggacaa gggcaccttc cagttctcgt ccaagcacaa |
| 841 | ggcggcgctg gcgcaccgct ggggcatcca gaagggcaac cgcaagaaga tgacctacca |
| 901 | gaagatggcg cgcgcgctgc gcaactacgg caagacgggc gaggtcaaga aggtgaagaa |
| 961 | gaagctcacc taccagttca gcggcgaagt gctgggccgc gggggcctgg ccgagcggcg |
| 1021 | ccacccgccc cactgagccc gcagcccccg ccgggccccg ccaggcctcc ccgctggcca |
| 1081 | tagcattaag ccctcgcccg gcccggacac agggaggacg ctcccggggc ccagaggcag |
| 1141 | gactgtggcg ggccgggcct cgcctcaccc gccccctccc cccactccag gccccctcca |
| 1201 | catcccgctt cgcctccctc caggactcca ccccggctcc cggacgccag ctgggcgtca |
| 1261 | gaccccaccg gggcaacctt gcagaggacg acccggggta ctgccttggg agtctcaagt |
| 1321 | ccgtatgtaa atcagatctc ccctctcacc cctcccaccc attaacctcc tcccaaaaaa |
| 1381 | caagtaaagt tattctcaat ccatcaaaaa aaaaaaaaaa aaa |

SEQ ID NO: 106 Human SPI1 Isoform 2 Amino Acid Sequence (NP_003111.2)

| | |
|---|---|
| 1 | mlqackmegf plvpppsedl vpydtdlyqr qtheyypyls sdgeshsdhy wdfhphhvhs |
| 61 | efeefaennf telqsvqppq lqqlyrhmel eqmhvldtpm vpphpslghq vsylprmclq |
| 121 | ypslspaqps sdeeegerqs pplevsdgea dglepgpgll pgetgskkki rlyqflldll |
| 181 | rsgdmkdsiw wvdkdkgtfq fsskhkeala hrwgiqkgnr kkmtyqkmar alrnygktge |
| 241 | vkkvkkklty qfsgevlgrg glaerrhpph |

SEQ ID NO: 107 Mouse SPI1 cDNA Sequence (NM_011355.2; CDS: 272-1090)

| | |
|---|---|
| 1 | aagagattta tgcaaacggg ctggggcggt gatgtcaccc caaggggact atctcccagt |
| 61 | ggcaggccct tcgataaaat caggaacttg tgctggccct gcaatgtcaa gggagggggc |
| 121 | tcacccaggg ctcctgtagc tcagggggca ggcctgagcc ctgcgtctga cccacgaccg |
| 181 | tccagtcccc cgacggggca cctggtcctg agggggatcc gccttgatcc ccaccgaagc |
| 241 | aggggatctg accaacctgg agctcagctg gatgttacag gcgtgcaaaa tggaagggtt |
| 301 | ttccctcacc gcccctccat cggatgactt ggttacttac gattcagagc tataccaacg |
| 361 | tccaatgcat gactactact ccttcgtggg cagcgatgga gaaagccata gcgatcacta |
| 421 | ctgggatttc tccgcacacc atgtccacaa caacgagttt gagcccttcc ctgagaacca |
| 481 | cttcacagag ctgcagagtg tgcagccccc gcagctacag cagctctatc gccacatgga |
| 541 | gctggaacag atgcacgtcc tcgatactcc catggtgcca ccccacaccg gcctcagtca |
| 601 | ccaggtttcc tacatgcccc ggatgtgctt cccttatcaa accttgtccc cagcccacca |
| 661 | gcagagctca gatgaggagg agggtgagag gcagagccct cccctggagg tgtatgatgg |
| 721 | agaagctgat ggcttggagc ctgggccagg tcttctgcac ggggagacag gcagcaagaa |
| 781 | aaagattcgc ctgtaccagt tcctgctgga cctgctgcgc agcggcgaca tgaaggacag |
| 841 | catctggtgg gtggacaagg acaaaggtac cttccagttc tcgtccaagc acaaggaggc |
| 901 | gctggcgcac cgctggggca tccagaaggg caaccgcaag aagctgacct accagaagat |
| 961 | ggcgcgcgcg ctgcgcaact acggcaagac aggcgaggtg aagcaagtca agaagaagct |
| 1021 | cacctaccag ttcagcggcg aggtgctggg ccgtgggggc ctggccgagc ggcgcctccc |
| 1081 | gccccactga tcgcccgcag agaccgccag gctcctggac cccgccggcc atagcattaa |
| 1141 | cccgtcgccc ggcccggaca cagggaggac attcccaggg ccgaggcagg actgggggcc |
| 1201 | cggcctcgcc ctcccatgcc cggcctggcc cgccccaccc gctttgcctc ccaccaggac |
| 1261 | tctagcccgc tccaagggcc gcctgggcct cggacctcaa ccgagggtca gcctggctta |
| 1321 | gtggccacgg tgcttccttg ggagtctggc gctggcacct ttttgtatat tgaatgcttt |
| 1381 | ttaaaaagct cttcctcccc accccctcat tagtcactaa agacaagtaa aattattgac |
| 1441 | agctattctc ccagaaaaaa aaaaaaaaaa aaa |

SEQ ID NO: 108 Mouse SPI1 Amino Acid Sequence (NP_035485.1)

| | |
|---|---|
| 1 | mlqackmegf sltappsddl vtydselyqr pmhdyysfvg sdgeshsdhy wdfsahhvhn |
| 61 | nefenfpenh ftelqsvqpp qlqqlyrhme leqmhviltp mvpphtglsh qvsvmprmcf |
| 121 | pyqtlspahq qssdeeeger qspplevsdg eadglepgpg llhgetgskk kirlyqflld |
| 781 | llrsgdmkds iwwvdkdkgt fqfsskhkea lahrwgiqkg nrkkmtyqkm aralrnygkt |
| 241 | gevkkvkkkl tyqfsgevlg rgglaerrlp ph |

SEQ ID NO: 109 Human LILRB2 Transcript Variant 1 cDNA Sequence
(NM_005874.4; CDS: 267-2063)

| | |
|---|---|
| 1 | atttggttga aagaaaaccc acaatccagt gtcaagaaag aagtcaactt ttcttcccct |

w

| | |
|---|---|
| 61 | acttccctgc atttctcctc tgtgctcact gccacacaca gctcaacctg gacagcacag |
| 121 | ccagaggcga gatgcttctc tgctgatctg agtctgcctg cagcatggac ctgggtcttc |
| 181 | cctgaagcat ctccagggct ggagggacga ctgccatgca ccgagggctc atccatccgc |
| 241 | agagcagggc agtgggaggg gacgccatga cccccatcgt cacagtcctg atctgtctcg |
| 301 | ggctgagtct gggccccagg acccgcgtgc agacagggac catccccaag cccaccctgt |
| 361 | gggctgagcc agactctgtg atcacccagg ggagtcccgt caccctcagt tgtcagggga |
| 421 | gccttgaagc ccaggagtac cgtctatata gggagaaaaa atcagcatct tggattacac |
| 481 | ggatacgacc agagcttgtg aagaacggcc agttccacat cccatccatc acctgggaac |
| 541 | acacagggcg atatggctgt cagtattaca gccgcgctcg gtggtctgag ctcagtgacc |
| 601 | ccctggtgct ggtgatgaca ggagcctacc caaaacccac cctctcagcc cagcccagcc |
| 661 | ctgtggtgac ctcaggagga agggtgaccc tccagtgtga gtcacaggtg gcatttggcg |
| 721 | gcttcattct gtgtaaggaa ggagaagatg aacacccaca atgcctgaac tcccagcccc |
| 781 | atgcccgtgg gtcgtcccgc gccatcttct ccgtgggccc cgtgagcccg aatcgcaggt |
| 841 | ggtcgcacag gtgctatggt tatgacttga actctcccta tgtgtggtct tcacccagtg |
| 901 | atctcctgga gctcctggtc ccaggtgttt ctaagaagcc atcactctca gtgcagccgg |
| 961 | gtcctgtcat ggcccctggg gaaagcctga ccctccagtg tgtctctgat gtcggctatg |
| 1021 | acagatttgt tctgtacaag gagggggaac gtgaccttcg ccagctccct ggccggcagc |
| 1081 | cccaggctgg gctctcccag gccaacttca ccctgggccc tgtgagccgc tcctacgggg |
| 1141 | gccagtacag atgctacggt gcacacaacc tctcctctga gtgctcggcc cccagcgacc |
| 1201 | ccctggacat cctgatcaca ggacagatcc gtggcacacc cttcatctca gtgcagccag |
| 1261 | gccccacagt ggcctcagga gagaacgtga ccctgctgtg tcagtcatgg cggcagttcc |
| 1321 | acactttcct tctgaccaag gcgggagcag ctgatgcccc actccgtcta agatcaatac |
| 1381 | acgaatatcc taagtaccag gctgaattcc ccatgagtcc tgtgacctca gcccacgcgg |
| 1441 | ggacctacag gtgctacggc tcactcaact ccgaccccta cctgctgtct caccccagtg |
| 1501 | agcccctgga gctcgtggtc tcaggaccct ccatgggttc cagcccccca cccaccggtc |
| 1561 | ccatctccac acctgcaggc cctgaggacc agcccctcac ccccactggg tcggatcccc |
| 1621 | aaagtggtct gggaaggcac ctgggggttg tgatcggcat cttggtggcc gtcgtcctac |
| 1681 | tgctcctcct cctcctcctc ctcttcctca tcctccgaca tcgacgtcag ggcaaacact |
| 1741 | ggacatcgac ccagagaaag gctgatttcc aacatcctgc aggggctgtg gggccagagc |
| 1801 | ccacagacag aggcctgcag tggaggtcca gcccagctgc cgacgcccag gaagaaaacc |
| 1861 | tctatgctgc cgtgaaggac acacagcctg aagatggggt ggagatggac actcgggctg |
| 1921 | ctgcatctga agccccccag gatgtgacct acgcccagct gcacagcttg accctcagac |
| 1981 | ggaaggcaac tgagcctcct ccatcccagg aaagggaacc tccagctgag cccagcatct |
| 2041 | acgccaccct ggccatccac tagcccggag ggtacgcaga ctccacactc agtagaagga |
| 2101 | gactcaggac tgctgaaggc acgggagctg cccccagtgg acaccaatga accccagtca |
| 2161 | gcctggaccc ctaacaaaga ccatgaggag atgctgggaa ctttgggact cacttgattc |
| 2221 | tgcagtcgaa ataactaata tccctacatt ttttaattaa agcaacagac ttctcaataa |
| 2281 | tcaatgagtt aaccgagaaa actaaaatca gaagtaagaa tgtgctttaa actgaatcac |
| 2341 | aatataaata ttacacatca cacaatgaaa ttgaaaaagt acaaaccaca aatgaaaaaa |
| 2401 | gtagaaacga aaaaaaaaaa ctaggaaatg aatgacgttg gctttcgtat aaggaattta |
| 2461 | gaaaaagaat aaccaattat tccaaatgaa ggtgtaagaa agggaataag aagaagaaga |
| 2521 | gttgctcatg aggaaaaacc aaaacttgaa aattcaacaa agccaatgaa gctcattctt |
| 2581 | gaaaatatta attacagtca taaatcctaa ctacattgag caagagaaag aaagagcagg |
| 2641 | cacgcatttc catatgggag tgagccagca gacagcccag cagatcctac acacattttc |
| 2701 | acaaactaac cccagaacag gctgcaaacc tataccaata tactagaaaa tgcagattaa |
| 2761 | atggatgaaa tattcaaaac tggagtttac ataatgaacg taagagtaat cagagaatct |
| 2821 | gactcatttt aaatgtgtgt gtatgtgtgt gtatatatat gtgtgtgtgt gtgtgtgtgt |
| 2881 | gtgtgtgtga aaaacattga ctgtaataaa aatgttccca tcgtaaaaaa aaaaaaaaa |

SEQ ID NO: 110 Human LILRB2 Isoform 1 Amino Acid Sequence (NP_005865.3)

| | |
|---|---|
| 1 | mtpivtvlic lglslgprtr vqtgtipkpt lwaepdsvit qgspvtlscq gsleaqeyrl |
| 61 | yrekksaswi trirpelvkn gqfhipsitw ehtgrygcqy ysrarwsels dplvlvmtga |
| 121 | ypkptlsaqp spvvtsggrv tlqcesqvaf ggfilckege dehpqclnsq phargssrai |
| 181 | fsvgpvspnr rwshrcygyd lnspyvwssp sdllellvpg vskkpslsyq pgpvmapges |
| 241 | ltlqcvsdvg ydrfvlykeg erdlrqlpqr qpqaglsqan ftlgpvsrsy qgqyrcygah |
| 301 | nlssecsaps dpldilitgq irgtpfisvq pgptvasgen vtllcqswrq fhtflltkag |
| 361 | aadaplrlrs iheypkyqae fpmspvtsah agtyrcygsl nsdpyllshp seplelvvsg |
| 421 | psmgsspppt gpistpagpe dqpltptgsd pqsglgrhlg vvigilvavv lllllllllf |
| 481 | lilrhrrqgk hwtstqrkad fqhpagaygp eptdrglqwr sspaadaqee nlyaavkdtq |
| 541 | pedgvemdtr aaaseapqdv tyaqlhsltl rrkateppps qereppaeps iyatlaih |

SEQ ID NO: 111 Human LILRB2 Transcript Variant 2 cDNA Sequence
(NM_001080978.3; CDS: 267-2060)

| | |
|---|---|
| 1 | atttggttga aagaaaaccc acaatccagt gtcaagaaag aagtcaactt ttcttcccct |
| 61 | acttccctgc atttctcctc tgtgctcact gccacacaca gctcaacctg gacagcacag |
| 121 | ccagaggcga gatgcttctc tgctgatctg agtctgcctg cagcatggac ctgggtcttc |
| 181 | cctgaagcat ctccagggct ggagggacga ctgccatgca ccgagggctc atccatccgc |
| 241 | agagcagggc agtgggagga gacgccatga cccccatcgt cacagtcctg atctgtctcg |
| 301 | ggctgagtct gggccccagg acccgcgtgc agacagggac catccccaag cccaccctgt |
| 361 | gggctgagcc agactctgtg atcacccagg ggagtcccgt caccctcagt tgtcagggga |
| 421 | gccttgaagc ccaggagtac cgtctatata gggagaaaaa atcagcatct tggattacac |
| 481 | ggatacgacc agagcttgtg aagaacggcc agttccacat cccatccatc acctgggaac |
| 541 | acacagggcg atatggctgt cagtattaca gccgcgctcg gtggtctgag ctcagtgacc |
| 601 | ccctggtgct ggtgatgaca ggagcctacc caaaacccac cctctcagcc cagcccagcc |
| 661 | ctgtggtgac ctcaggagga agggtgaccc tccagtgtga gtcacaggtg gcatttggcg |
| 721 | gcttcattct gtgtaaggaa ggagaagatg aacacccaca atgcctgaac tcccagcccc |
| 781 | atgcccgtgg gtcgtcccgc gccatcttct ccgtgggccc cgtgagcccg aatcgcaggt |
| 841 | ggtcgcacag gtgctatggt tatgacttga actctcccta tgtgtggtct tcacccagtg |
| 901 | atctcctgga gctcctggtc ccaggtgttt ctaagaagcc atcactctca gtgcagccgg |
| 961 | gtcctgtcat ggcccctggg gaaagcctga ccctccagtg tgtctctgat gtcggctatg |
| 1021 | acagatttgt tctgtacaag gagggggaac gtgaccttcg ccagctccct ggccggcagc |
| 1081 | cccaggctgg gctctcccag gccaacttca ccctgggccc tgtgagccgc tcctacgggg |
| 1141 | gccagtacag atgctacggt gcacacaacc tctcctctga gtgctcggcc cccagcgacc |
| 1201 | ccctggacat cctgatcaca ggacagatcc gtggcacacc cttcatctca gtgcagccag |
| 1261 | gccccacagt ggcctcagga gagaacgtga ccctgctgtg tcagtcatgg cggcagttcc |
| 1321 | acactttcct tctgaccaag gcgggagcag ctgatgcccc actccgtcta agatcaatac |
| 1381 | acgaatatcc taagtaccag gctgaattcc ccatgagtcc tgtgacctca gcccacgcgg |
| 1441 | ggacctacag gtgctacggc tcactcaact ccgaccccta cctgctgtct caccccagtg |
| 1501 | agcccctgga gctcgtggtc tcaggaccct ccatgggttc cagcccccca cccaccggtc |
| 1561 | ccatctccac acctggccct gaggaccagc ccctcacccc cactgggtcg gatccccaaa |
| 1621 | gtggtctggg aaggcacctg ggggttgtga tcggcatctt ggtggccgtc gtcctactgc |
| 1681 | tcctcctcct cctcctcctc ttcctcatcc tccgacatcg acgtcagggc aaacactgga |
| 1741 | catcgaccca gagaaaggct gatttccaac atcctgcagg ggctgtgggg ccagagccca |
| 1801 | cagacagagg cctgcagtgg aggtccagcc cagctgccga cgcccaggaa gaaaacctct |
| 1861 | atgctgccgt gaaggacaca cagcctgaag atggggtgga gatggacact cgggctgctg |
| 1921 | catctgaagc cccccaggat gtgacctacg cccagctgca cagcttgacc ctcagacgga |
| 1981 | aggcaactga gcctcctcca tcccaggaaa gggaacctcc agctgagccc agcatctacg |
| 2041 | ccaccctggc catccactag cccggagggt acgcagactc cacactcagt agaaggagac |
| 2101 | tcaggactgc tgaaggcacg ggagctgccc ccagtggaca ccaatgaacc ccagtcagcc |
| 2161 | tggaccccta acaaagacca tgaggagatg ctgggaactt tgggactcac ttgattctgc |
| 2221 | agtcgaaata actaatatcc ctacattttt taattaaagc aacagacttc tcaataatca |
| 2281 | atgagttaac cgagaaaact aaaatcagaa gtaagaatgt gctttaaact gaatcacaat |
| 2341 | ataaatatta cacatcacac aatgaaattg aaaaagtaca aaccacaaat gaaaaaagta |
| 2401 | gaaacgaaaa aaaaaaacta ggaaatgaat gacgttggct ttcgtataag gaatttagaa |
| 2461 | aaagaataac caattattcc aaatgaaggt gtaagaaagg gaataagaag aagaagagtt |
| 2521 | gctcatgagg aaaaaccaaa acttgaaaat tcaacaaagc caatgaagct cattcttgaa |
| 2581 | aatattaatt acagtcataa atcctaacta cattgagcaa gagaaagaaa gagcaggcac |
| 2641 | gcatttccat atgggagtga gccagcagac agcccagcag atcctacaca cattttcaca |
| 2701 | aactaacccc agaacaggct gcaaacctat accaatatac tagaaaatgc agattaaatg |
| 2761 | gatgaaatat tcaaaactgg agtttacata atgaacgtaa gagtaatcag agaatctgac |
| 2821 | tcattttaaa tgtgtgtgta tgtgtgtgta tatatatgtg tgtgtgtgtg tgtgtgtgtg |
| 2881 | tgtgtgaaaa acattgactg taataaaaat gttcccatcg taaaaaaaaa aaaaaaa |

SEQ ID NO: 112 Human LILRB2 Isoform Amino Acid Sequence (NP_001074447.2
and NP_001265332.2)

| | |
|---|---|
| 1 | mtpivtvlic lglslgprtr vqtgtipkpt lwaepdsvit qgspvtlscq gsleaqeyrl |
| 61 | yrekksaswi trirpelvkn gqfhipsitw ehtgrygcqy ysrarwsels dplvlvmtga |
| 121 | ypkptlsaqp spvvtsggrv tlqcesqvaf ggfilckege dehpqclnsq phargssrai |
| 181 | fsvgpvspnr rwshrcygyd lnspyvwssp sdllellvpg vskkpslsvq pgpvmapges |
| 241 | ltlqcvsdvg ydrfvlykeg erdlrqlpgr qpqaglsqan ftlgpvsrsy gggyrcyqah |
| 301 | nlssecsaps dpldilitgq irgtpfisvq pgptvasgen vtllcqswrq fhtflltkag |
| 361 | aadaplrlrs iheypkyqae fpmspvtsah agtyrcygsl nsdpyllshp seplelvvsg |
| 421 | psmgsspppt gpistpgped qpltptgsdp qsglgrhlgv vigilvavvl llllllllfl |
| 481 | ilrhrrqgkh wtstqrkadf qhpagavgpe ptdrglqwrs spaadaqeen lyaavkdtqp |
| 541 | edgvemdtra aaseapqdvt yaqlhsltlr rkatepppsq ereppaepsi yatlaih |

SEQ ID NO: 113 Human LILRB2 Transcript Variant 3 cDNA Sequence
(NM_001278403.2 CDS: 129-1922)

| | |
|---|---|
| 1 | ggggaagcca ctgctaccct catcaggaag ggcagacaca agaagcacca gttctatttg |
| 61 | ctgctacatc ccggctctcg caccgagggc tcatccatcc gcagagcagg gcagtgggag |
| 121 | gagacgccat gacccccatc gtcacagtcc tgatctgtct cgggctgagt ctgggcccca |
| 181 | ggacccgcgt gcagacaggg accatcccca agcccaccct gtgggctgag ccagactctg |
| 241 | tgatcaccca ggggagtccc gtcaccctca gttgtcaggg gagccttgaa gcccaggagt |
| 301 | accgtctata tagggagaaa aaatcagcat cttggattac acggatacga ccagagcttg |
| 361 | tgaagaacgg ccagttccac atcccatcca tcacctggga acacacaggg cgatatggct |
| 421 | gtcagtatta cagccgcgct cggtggtctg agctcagtga ccccctggtg ctggtgatga |
| 481 | caggagccta cccaaaaccc accctctcag cccagcccag ccctgtggtg acctcaggag |
| 541 | gaagggtgac cctccagtgt gagtcacagg tggcatttgg cggcttcatt ctgtgtaagg |
| 601 | aaggagaaga tgaacaccca caatgcctga actcccagcc ccatgcccgt gggtcgtccc |
| 661 | gcgccatctt ctccgtgggc cccgtgagcc cgaatcgcag gtggtcgcac aggtgctatg |
| 721 | gttatgactt gaactctccc tatgtgtggt cttcacccag tgatctcctg gagctcctgg |
| 781 | tcccaggtgt ttctaagaag ccatcactct cagtgcagcc gggtcctgtc atggcccctg |
| 841 | gggaaagcct gaccctccag tgtgtctctg atgtcggcta tgacagattt gttctgtaca |
| 901 | aggaggggga acgtgacctt cgccagctcc ctggccggca gccccaggct gggctctccc |
| 961 | aggccaactt caccctgggc cctgtgagcc gctcctacgg gggccagtac agatgctacg |
| 1021 | gtgcacacaa cctctcctct gagtgctcgg cccccagcga ccccctggac atcctgatca |
| 1081 | caggacagat ccgtggcaca cccttcatct cagtgcagcc aggccccaca gtggcctcag |
| 1141 | gagagaacgt gaccctgctg tgtcagtcat ggcggcagtt ccacactttc cttctgacca |
| 1201 | aggcgggagc agctgatgcc ccactccgtc taagatcaat acacgaatat cctaagtacc |
| 1261 | aggctgaatt ccccatgagt cctgtgacct cagcccacgc ggggacctac aggtgctacg |
| 1321 | gctcactcaa ctccgacccc tacctgctgt ctcaccccag tgagcccctg gagctcgtgg |
| 1381 | tctcaggacc ctccatgggt tccagccccc cacccaccgg tcccatctcc acacctggcc |
| 1441 | ctgaggacca gcccctcacc cccactgggt cggatcccca aagtggtctg ggaaggcacc |
| 1501 | tgggggttgt gatcggcatc ttggtggccg tcgtcctact gctcctcctc ctcctcctcc |
| 1561 | tcttcctcat cctccgacat cgacgtcagg gcaaacactg gacatcgacc cagagaaagg |
| 1621 | ctgatttcca acatcctgca ggggctgtgg ggccagagcc cacagacaga ggcctgcagt |
| 1681 | ggaggtccag cccagctgcc gacgcccagg aagaaaacct ctatgctgcc gtgaaggaca |
| 1741 | cacagcctga agatggggtg gagatggaca ctcgggctgc tgcatctgaa gccccccagg |
| 1801 | atgtgaccta cgcccagctg cacagcttga ccctcagacg gaaggcaact gagcctcctc |
| 1861 | catcccagga aagggaacct ccagctgagc ccagcatcta cgccaccctg gccatccact |
| 1921 | agcccggagg gtacgcagac tccacactca gtagaaggag actcaggact gctgaaggca |
| 1981 | cgggagctgc ccccagtgga caccaatgaa ccccagtcag cctggacccc taacaaagac |
| 2041 | catgaggaga tgctgggaac tttgggactc acttgattct gcagtcgaaa taactaatat |
| 2101 | ccctacattt tttaattaaa gcaacagact tctcaataat caatgagtta accgagaaaa |
| 2161 | ctaaaatcag aagtaagaat gtgctttaaa ctgaatcaca atataaatat tacacatcac |
| 2221 | acaatgaaat tgaaaaagta caaaccacaa atgaaaaaag tagaaacgaa aaaaaaaaac |
| 2281 | taggaaatga atgacgttgg ctttcgtata aggaatttag aaaaagaata accaattatt |
| 2341 | ccaaatgaag gtgtaagaaa gggaataaga agaagaagag ttgctcatga ggaaaaacca |
| 2401 | aaacttgaaa attcaacaaa gccaatgaag ctcattcttg aaaatattaa ttacagtcat |
| 2461 | aaatcctaac tacattgagc aagagaaaga aagagcaggc acgcatttcc atatgggagt |
| 2521 | gagccagcag acagcccagc agatcctaca cacattttca caaactaacc ccagaacagg |
| 2581 | ctgcaaacct ataccaatat actagaaaat gcagattaaa tggatgaaat attcaaaact |
| 2641 | ggagtttaca taatgaacgt aagagtaatc agagaatctg actcatttta aatgtgtgtg |
| 2701 | tatgtgtgtg tatatatatg tgtgtgtgtg tgtgtgtgtg tgtgtgtgaa aaacattgac |
| 2761 | tgtaataaaa atgttcccat cgtaaaaaaa aaaaaaaaa |

SEQ ID NO: 114 Human LILRB2 Transcript Variant 4 cDNA Sequence
(NM_001278404.2; CDS: 464-1912)

| | |
|---|---|
| 1 | atttggttga aagaaaaccc acaatccagt gtcaagaaag aagtcaactt ttcttcccct |
| 61 | acttccgtgc atttctcctc tgtgctcact gccacacaca gctcaacctg gacagcacag |
| 121 | ccagaggcga gatgcttctc tgctgatctg agtctgcctg cagcatggac ctgggtcttc |
| 181 | cctgaagcat ctccagggct ggagggacga ctgccatgca ccgagggctc atccatccgc |
| 241 | agagcagggc agtgggagga gacgccatga cccccatcgt cacagtcctg atctgtctcg |
| 301 | ggagaaaaaa tcagcatctt ggattacacg gatacgacca gagcttgtga agaacggcca |
| 361 | gttccacatc ccatccatca cctgggaaca cacagggcga tatggctgtc agtattacag |
| 421 | ccgcgctcgg tggtctgagc tcagtgaccc cctggtgctg gtgatgacag gagcctaccc |
| 481 | aaaacccacc ctatcagccc agcccagccc tgtggtgacc tcaggaggaa gggtgaccct |
| 541 | ccagtgtgag tcacaggtgg catttggcgg cttcattctg tgtaaggaag gagaagatga |
| 601 | acacccacaa tgcctgaact cccagcccca tgcccgtggg tcgtcccgcg ccatcttctc |
| 661 | cgtgggcccc gtgagcccga atcgcaggtg gtcgcacagg tgctatggtt atgacttgaa |
| 721 | ctctccctat gtgtggtctt cacccagtga tctcctggag ctcctggtcc caggtgtttc |
| 781 | taagaagcca tcactctcag tgcagccggg tcctgtcatg gcccctgggg aaagcctgac |
| 841 | cctccagtgt gtctctgatg tcggctatga cagatttgtt ctgtacaagg agggggaacg |
| 901 | tgaccttcgc cagctccctg gccggcagcc ccaggctggg ctctcccagg ccaacttcac |
| 961 | cctgggccct gtgagccgct cctacggggg ccagtacaga tgctacggtg cacacaacct |
| 1021 | ctcctctgag tgctcggccc ccagcgaccc cctggacatc ctgatcacag gacagatccg |
| 1081 | tggcacaccc ttcatctcag tgcagccagg ccccacagtg gcctcaggag agaacgtgac |
| 1141 | cctgctgtgt cagtcatggc ggcagttcca cactttcctt ctgaccaagg cgggagcagc |
| 1201 | tgatgcccca ctccgtctaa gatcaataca cgaatatcct aagtaccagg ctgaattccc |
| 1261 | catgagtcct gtgacctcag cccacgcggg gacctacagg tgctacggct cactcaactc |
| 1321 | cgacccctac ctgctgtctc accccagtga gcccctggag ctcgtggtct caggaccctc |
| 1381 | catgggttcc agccccccac ccaccggtcc catctccaca cctgcaggcc ctgaggacca |
| 1441 | gcccctcacc cccactgggt cggatcccca aagtggtctg ggaaggcacc tgggggttgt |
| 1501 | gatcggcatc ttggtggccg tcgtcctact gctcctcctc ctcctcctcc tcttcctcat |
| 1561 | cctccgacat cgacgtcagg gcaaacactg gacatcgacc cagagaaagg ctgatttcca |
| 1621 | acatcctgca ggggctgtgg ggccagagcc cacagacaga ggcctgcagt ggaggtccag |
| 1681 | cccagctgcc gacgcccagg aagaaaacct ctatgctgcc gtgaaggaca cacagcctga |
| 1741 | agatggggtg gagatggaca ctcgggctgc tgcatctgaa gccccccagg atgtgaccta |
| 1801 | cgcccagctg cacagcttga ccctcagacg gaaggcaact gagcctcctc catcccagga |
| 1861 | aagggaacct ccagctgagc ccagcatcta cgccaccctg gccatccact agcccggagg |
| 1921 | gtacgcagac tccacactca gtagaaggag actcaggact gctgaaggca cgggagctgc |
| 1981 | ccccagtgga caccaatgaa ccccagtcag cctggacccc taacaaagac catgaggaga |
| 2041 | tgctgggaac tttgggactc acttgattct gcagtcgaaa taactaatat ccctacattt |
| 2101 | tttaattaaa gcaacagact tctcaataat caatgagtta accgagaaaa ctaaaatcag |
| 2161 | aagtaaccat gtgctttaaa ctgaatcaca atataaatat tacacatcac acaatgaaat |
| 2221 | tgaaaaagta caaaccacaa atgaaaaaag tagaaacgaa aaaaaaaaac taggaaatga |
| 2281 | atgacgttgg ctttcgtata aggaatttag aaaaagaata accaattatt ccaaatgaag |
| 2341 | gtgtaagaaa gggaataaga agaagaagag ttgctcatga ggaaaaacca aaacttgaaa |
| 2401 | attcaacaaa gccaatgaag ctcattcttg aaaatattaa ttacagtcat aaatcctaac |
| 2461 | tacattgagc aagagaaaga aagagcaggc acgcatttcc atatgggagt gagccagcag |
| 2521 | acagcccagc agatcctaca cacaLtttca caaactaacc ccagaacagg ctgcaaacct |
| 2581 | ataccaatat actagaaaat gcagattaaa tggatgaaat attcaaaact ggagtttaca |
| 2641 | taatgaacgt aagagtaatc agagaatctg actcatttta aatgtgtgtg tatgtgtgtg |
| 2701 | tatatatatg tgtgtgtgtg tgtgtgtgtg tgtgtgtgaa aaacattgac tgtaataaaa |
| 2761 | atgttcccat cgtaaaaaaa aaaaaaaaa |

SEQ ID NO: 115 Human LILRB2 Isoform 3 Amino Acid Sequence
(NP_001265333.2)

| | |
|---|---|
| 1 | mtgaypkptl saqpspvvts ggrvtlqces qvafggfilc kegedehpqc lnsqphargs |
| 61 | sraifsvgpv spnrrwshrc ygvdlnspyv wsspsdllel lvpgvskkps lsvqpgpvma |
| 121 | pgesltlqcv sdvgydrfvl ykegerdlrq lpgrqpqagl sqanftlgpv srsyggqyrc |
| 181 | ygahnlssec sapsdpldil itgqirgtpf isvqpgptva sgenvtllcq swrqfhtfll |
| 241 | tkagaadapl rlrsiheypk yqaefpmspv tsahagtyrc ygslnsdpyl lshpseplel |
| 301 | vvsgpsmgss ppptgpistp agpedqpltp tgsdpqsglg rhlgvvigil vavvllllll |
| 361 | lllflilrhr rqgkhwtstq rkadfghpag avgpeptdrg lqwrsspaad aqeenlyaav |
| 421 | kdtqpedgve mdtraaasea pqdvtyaqlh sltlrrkate pppsqerepp aepsiyatla |
| 481 | ih |

SEQ ID NO: 116 Human LILRB2 Transcript Variant 5 CDNA Sequence
(NM_001278405.2; CDS: 49-1581)

| | |
|---|---|
| 1 | caccgagggc tcatccatcc gcagagcagg gcagtgggag gagacgccat gacccccatc |
| 61 | gtcacagtcc tgatctgtct cgggctgagt ctgggcccca ggacccgcgt gcagacaggg |
| 121 | accatcccca agcccaccct gtgggctgag ccagactctg tgatcaccca ggggagtccc |
| 181 | gtcaccctca gttgtcaggg gagccttgaa gcccaggagt accgtctata tagggagaaa |
| 241 | aaatcagcat cttggattac acggatacga ccagagcttg tgaagaacgg ccagttccac |
| 301 | atcccatcca tcacctggga acacacaggg cgatatggct gtcagtatta cagccgcgct |
| 361 | cggtggtctg agctcagtga ccccctggtg ctggtgatga caggagccta cccaaaaccc |
| 421 | accctatcag cccagcccag ccctgtggtg acctcaggag gaagggtgac cctccagtgt |
| 481 | gagtcacagg tggcatttgg cggcttcatt ctgtgtaagg aaggagaaga tgaacaccca |
| 541 | caatgcctga actcccagcc ccatgcccgt gggtcgtccc gcgccatctt ctccgtgggc |
| 601 | cccgtgagcc cgaatcgcag gtggtcgcac aggtgctatg gttatgactt gaactctccc |
| 661 | tatgtgtggt cttcacccag tgatctcctg gagctcctgg tcccaggtgt ttctaagaag |
| 721 | ccatcactct cagtgcagcc gggtcctgtc atggcccctg gggaaagcct gaccctccag |
| 781 | tgtgtctctg atgtcggcta tgacagattt gttctgtaca aggaggggga acgtgacctt |
| 841 | cgccagctcc ctggccggca gccccaggct gggctctccc aggccaactt caccctgggc |
| 901 | cctgtgagcc gctcctacgg gggccagtac agatgctacg gtgcacacaa cctctcctct |
| 961 | gagtgctcgg cccccagcga ccccctggac atcctgatca caggacagat ccgtggcaca |
| 1021 | cccttcatct cagtgcagcc aggccccaca gtggcctcag gagagaacgt gaccctgctg |
| 1081 | tgtcagtcat ggcggcagtt ccacactttc cttctgacca aggcgggagc agctgatgcc |
| 1141 | ccactccgtc taagatcaat acacgaatat cctaagtacc aggctgaatt ccccatgagt |
| 1201 | cctgtgacct cagcccacgc ggggacctac aggtgctacg gctcactcaa ctccgacccc |
| 1261 | tacctgctgt ctcaccccag tgagcccctg gagctcgtgg tctcaggacc ctccatgggt |
| 1321 | tccagccccc cacccaccgg tcccatctcc acacctgcag gccctgagga ccagcccctc |
| 1381 | acccccactg ggtcggatcc ccaaagtggt ctgggaaggc acctgggggt tgtgatcggc |
| 1441 | atcttggtgg ccgtcgtcct actgctcctc ctcctcctcc tcctcttcct catcctccga |
| 1501 | catcgacgtc agggcaaaca ctggacatcg agtccagccc agctgccgac gcccaggaag |
| 1561 | aaaacctcta tgctgccgtg aaggacacac agcctgaaga tggggtggag atggacactc |
| 1621 | gggctgctgc atctgaagcc ccccaggatg tgacctacgc ccagctgcac agcttgaccc |
| 1681 | tcagacggaa ggcaactgag cctcctccat cccagggaag ggaacctcca gctgagccca |
| 1741 | gcatctacgc caccctggcc atccactagc ccggagggta cgcagactcc acactcagta |
| 1801 | gaaggagact caggactgct gaaggcacgg gagctgcccc cagtggacac caatgaaccc |
| 1861 | cagtcagcct ggacccctaa caaagaccat gaggagatgc tgggaacttt gggactcact |
| 1921 | tgattctgca gtcgaaataa ctaatatccc tacatttttt aattaaagca acagacttct |
| 1981 | caataatcaa tgagttaacc gagaaaacta aaatcagaag taagaatgtg ctttaaactg |
| 2041 | aatcacaata taaatattac acatcacaca atgaaattga aaaagtacaa accacaaatg |
| 2101 | aaaaaagtag aaacgaaaaa aaaaaactag gaaatgaatg acgttggctt tcgtataagg |
| 2161 | aatttagaaa aagaataacc aattattcca aatgaaggtg taagaaaggg aataagaaga |
| 2221 | agaagagttg ctcatgagga aaaaccaaaa cttgaaaatt caacaaagcc aatgaagctc |
| 2281 | attcttgaaa atattaatta cagtcataaa tcctaactac attgagcaag agaaagaaag |
| 2341 | agcaggcacg catttccata tgggagtgag ccagcagaca gcccagcaga tcctacacac |
| 2401 | attttcacaa actaacccca gaacaggctg caaacctata ccaatatact agaaaatgca |
| 2461 | gattaaatgg atgaaatatt caaaactgga gtttarataa tgaacgtaag agtaatcaga |
| 2521 | gaatctgact cattttaaat gtgtgtgtat gtgtgtgtat atatatgtgt gtgtgtgtgt |
| 2581 | gtgtgtgtgt gtgtgaaaaa cattgactgt aataaaaatg ttcccatcgt aaaaaaaaaa |
| 2641 | aaaaaa |

SEQ ID NO: 117 Human LILRB2 Isoform 4 Amino Acid Sequence
(NP_001265334.2)

| | |
|---|---|
| 1 | mtpivtvlic lglslgprtr vqtgtipkpt lwaepdsvit qgspvtlscq gsleaqevrl |
| 61 | yrekksaswi trirpelvkn gqfhipsitw ehtgrygcqy ysrarwsels dplvlvmtga |
| 121 | ypkptlsaqp spvvtsggrv tlqcesqvaf qgfilckege dehpqclnsq phargssrai |
| 181 | fsvgpvspnr rwshrcygyd lnspyvwssp sdllellvpg vskkpslsvq pgpvmapges |
| 241 | ltlqcvsdvg ydrfvlvkeg erdlrqlpgr qpqaglsqan ftlgpvsrsy ggqyrcygah |
| 301 | nlssecsaps dpldilitgq irgtpfisvg pgptvasgen vtllcqswrq fhtflltkag |
| 361 | aadaplrlrs iheypkyqae fpmspvtsah agtyrcygsl nsdpyllshp seplelvvsg |
| 421 | psmgsspppt gpistpagpe dqpltptgsd pqsglgrhlg vvigilvavv lllllllllf |
| 481 | lilrhrrqgk hwtsspaqlp tprkktsmlp |

SEQ ID NO: 118 Human LILRB2 Transcript Variant 6 CDNA Sequence
(NM_001278406.2; CDS: 49-1416)

| | |
|---|---|
| 1 | caccgagggc tcatccatcc gcagagcagg gcagtgggag gagacgccat gacccccatc |
| 61 | gtcacagtcc tgatctgtct cgggctgagt ctgggcccca ggacccgcgt gcagacaggg |
| 121 | accatcccca agcccaccct gtgggctgag ccagactctg tgatcaccca ggggagtccc |
| 181 | gtcaccctca gttgtcaggg gagccttgaa gcccaggagt accgtctata tagggagaaa |
| 241 | aaatcagcat cttggattac acggatacga ccagagcttg tgaagaacgg ccagttccac |
| 301 | atcccatcca tcacctggga acacacaggg cgatatggct gtcagtatta cagccgcgct |
| 361 | cggtggtctg agctcagtga ccccgtggtg ctggtgatga caggagccta cccaaaaccc |
| 421 | accctctcag cccagcccag ccctgtggtg acctcaggag gaagggtgac cctccagtgt |
| 481 | gagtcacagg tggcatttgg cggcttcatt ctgtgtaagg aaggagaaga tgaacaccca |
| 541 | caatgcctga actcccagcc ccatgcccgt gggtcgtccc gcgccatctt ctccgtgggc |
| 601 | cccgtgagcc cgaatcgcag gtggtcgcac aggtgctatg gttatgactt gaactctccc |
| 661 | tatgtgtggt cttcacccag tgatctcctg gagctcctgg tcccaggtgt ttctaagaag |
| 721 | ccatcactct cagtgcagcc gggtcctgtc atggcccctg gggaaagcct gaccctccag |
| 781 | tgtgtctctg atgtcggcta tgacagattt gttctgtaca aggaggggga acgtgacctt |
| 841 | cgccagctcc ctggccggca gccccaggct gggctctccc aggccaactt caccctgggc |
| 901 | cctgtgagcc gctcctacgg gggccagtac agatgctacg gtgcacacaa cctctcctct |
| 961 | gagtgctcgg cccccagcga ccccctggac atcctgatca caggacagat ccgtggcaca |
| 1021 | cccttcatct cagtgcagcc aggccccaca gtggcctcag gagagaacgt gaccctgctg |
| 1081 | tgtcagtcat ggcggcagtt ccacactttc cttctgacca aggcgggagc agctgatgcc |
| 1141 | ccactccgtc taagatcaat acacgaatat cctaagtacc aggctgaatt ccccatgagt |
| 1201 | cctgtgacct cagcccacgc ggggacctac aggtgctacg gctcactcaa ctccgacccc |
| 1261 | tacctgctgt ctcaccccag tgagcccctg gagctcgtgg tctcaggacc ctccatgggt |
| 1321 | tccagccccc cacccaccgg tcccatctcc acacctgcag gccctgagga ccagcccctc |
| 1381 | acccccactg ggtcggatcc ccaaagtggt gagtgagggg ct |

SEQ ID NO: 119 Human LILRB2 Isoform 5 Amino Acid Sequence
(NP_001265335.2)

| | |
|---|---|
| 1 | mtpivtvlic lglslgprtr vqtgtipkpt lwaepdsvit qgspvtlscq gsleaqeyrl |
| 61 | yrekksaswi trirpelvkn gqfhipsitw ehtgrygcqy ysrarwsels dplvlvmtga |
| 121 | ypkptlsaqp spvvtsggrv tlqcesqvaf ggfilckege dehpqclnsq phargssrai |
| 181 | fsvgpvspnr rwshrcygyd lnspyvwssp sdllellvpg vskkpslsvq pgpvmapges |
| 241 | ltlqcvsdvg ydrfvlykeg erdlrqlpgr qpqaglsqan ftlgpvsrsy ggqyrcygah |
| 301 | nlssecsaps dpldilitgq irgtpfisvq pgptvasgen vtllcqswrq fhtflltkag |
| 361 | aadaplrlrs iheypkyqae fpmspvtsah agtyrcygsl nsdpyllshp seplelvvsg |
| 421 | psmgsspppt gpistpagpe dqpltptgsd pqsge |

SEQ ID NO: 120 Human CCR5 Transcript Variant A cDNA Sequence
(NM_000579.3; CDS: 358-1416

| | |
|---|---|
| 1 | cttcagatag attatatctg gagtgaagaa tcctgccacc tatgtatctg gcatagtatt |
| 61 | ctgtgtagtg ggatgagcag agaacaaaaa caaaataatc cagtgagaaa agcccgtaaa |
| 121 | taaaccttca gaccagagat ctattctcta gcttatttta agctcaactt aaaaagaaga |
| 181 | actgttctct gattcttttc gccttcaata cacttaatga tttaactcca ccctccttca |
| 241 | aaagaaacag catttcctac ttttatactg tctatatgat tgatttgcac agctcatctg |
| 301 | gccagaagag ctgagacatc cgttccccta caagaaactc tccccgggtg gaacaagatg |
| 361 | gattatcaag tgtcaagtcc aatctatgac atcaattatt atacatcgga gccctgccaa |
| 421 | aaaatcaatg tgaagcaaat cgcagcccgc ctcctgcctc cgctctactc actggtgttc |
| 481 | atctttggtt ttgtgggcaa catgctggtc atcctcatcc tgataaactg caaaaggctg |
| 541 | aagagcatga ctgacatcta cctgctcaac ctggccatct ctgacctgtt tttccttctt |
| 601 | actgtcccct tctgggctca ctatgctgcc gcccagtggg actttggaaa tacaatgtgt |
| 661 | caactcttga cagggctcta ttttataggc ttcttctctg gaatcttctt catcatcctc |
| 721 | ctgacaatcg ataggtacct ggctgtcgtc catgctgtgt ttgctttaaa agccaggacg |
| 781 | gtcacctttg gggtggtgac aagtgtgatc acttgggtgg tggctgtgtt tgcgtctctc |
| 841 | ccaggaatca tctttaccag atctcaaaaa gaaggtcttc attacacctg cagctctcat |
| 901 | tttccataca gtcagtatca attctggaag aatttccaga cattaaagat agtcatcttg |
| 961 | gggctggtcc tgccgctgct tgtcatggtc atctgctact cgggaatcct aaaaactctg |
| 1021 | cttcggtgtc gaaatgagaa gaagaggcac agggctgtga ggcttatctt caccatcatg |
| 1081 | attgtttatt ttctcttctg ggctccctac aacattgtcc ttctcctgaa caccttccag |
| 1141 | gaattctttg gcctgaataa ttgcagtagc tctaacaggt tggaccaagc tatgcaggtg |
| 1201 | acagagactc ttgggatgac gcactgctgc atcaacccca tcatctatgc ctttgtcggg |
| 1261 | gagaagttca gaaactacct cttagtcttc ttccaaaagc acattgccaa acgcttctgc |
| 1321 | aaatgctgtt ctattttcca gcaagaggct cccgagcgag caagctcagt ttacacccga |
| 1381 | tccactgggg agcaggaaat atctgtgggc ttgtgacacg gactcaagtg ggctggtgac |
| 1441 | ccagtcagag ttgtgcacat ggcttagttt tcatacacag cctgggctgg gggtggggtg |
| 1501 | gccgaggtct tttttaaaag gaagttactg ttatagaggg tctaagattc atccatttat |
| 1561 | ttggcatctg tttaaagtag attagatctt ttaagcccat caattataga aagccaaatc |
| 1621 | aaaatatgtt gatgaaaaat agcaaccttt ttatctcccc ttcacatgca tcaagttatt |
| 1681 | gacaaactct cccttcactc cgaaagttcc ttatgtatat ttaaaagaaa gcctcagaga |
| 1741 | attgctgatt cttgagttta gtgatctgaa cagaaatacc aaaattattt cagaaatgta |
| 1801 | caacttttta cctagtacaa ggcaacatat aggttgtaaa tgtgtttaaa acaggtcttt |
| 1861 | gtcttgctat ggggagaaaa gacatgaata tgattagtaa agaaatgaca cttttcatgt |
| 1921 | gtgatttccc ctccaaggta tggttaataa gtttcactga cttagaacca ggcgagagac |
| 1981 | ttgtggcctg ggagagctgg ggaagcttct taaatgagaa ggaatttgag ttggatcatc |
| 2041 | tattgctggc aaagacagaa gcctcactgc aagcactgca tgggcaagct tggctgtaga |
| 2101 | aggagacaga gctggttggg aagacatggg gaggaaggac aaggctagat catgaagaac |
| 2161 | cttgacggca ttgctccgtc taagtcatga gctgagcagg gagatcctgg ttggtgttgc |
| 2221 | agaaggttta ctctgtggcc aaaggagggt caggaaggat gagcatttag ggcaaggaga |
| 2281 | ccaccaacag ccctcaggtc agggtgagga tggcctctgc taagctcaag gcgtgaggat |
| 2341 | gggaaggagg gaggtattcg taaggatggg aaggagggag gtattcgtgc agcatatgag |
| 2401 | gatgcagagt cagcagaact ggggtggatt tgggttggaa gtgagggtca gagaggagtc |
| 2461 | agagagaatc cctagtcttc aagcagattg gagaaaccct tgaaaagaca tcaagcacag |
| 2521 | aaggaggagg aggaggttta ggtcaagaag aagatggatt ggtgtaaaag gatgggtctg |
| 2581 | gtttgcagag cttgaacaca gtctcaccca gactccaggc tgtctttcac tgaatgcttc |
| 2641 | tgacttcata gatttccttc ccatcccagc tgaaatactg aggggtctcc aggaggagac |
| 2701 | tagatttatg aatacacgag gtatgaggtc taggaacata cttcagctca cacatgagat |
| 2761 | ctaggtgagg attgattacc tagtagtcat ttcatgggtt gttgggagga ttctatgagg |
| 2821 | caaccacagg cagcatttag cacatactac acattcaata agcatcaaac tcttagttac |
| 2881 | tcattcaggg atagcactga gcaaagcatt gagcaaaggg gtcccataga ggtgagggaa |
| 2941 | gcctgaaaaa ctaagatgct gcctgcccag tgcacacaag tgtaggtatc attttctgca |
| 3001 | tttaaccgtc aataggcaaa ggggggaagg gacatattca tttggaaata agctgccttg |
| 3061 | agccttaaaa cccacaaaag tacaatttac cagcctccgt atttcagact gaatgggggt |
| 3121 | ggggggggcg ccttaggtac ttattccaga tgccttctcc agacaaacca gaagcaacag |
| 3181 | aaaaaatcgt ctctccctcc ctttgaaatg aatatacccc ttagtgtttg ggtatattca |
| 3241 | tttcaaaggg agagagagag gtttttttct gttctgtctc atatgattgt gcacatactt |
| 3301 | gagactgttt tgaatttggg ggatggctaa aaccatcata gtacaggtaa ggtgagggaa |
| 3361 | tagtaagtgg tgagaactac tcagggaatg aaggtgtcag aataataaga ggtgctactg |
| 3421 | actttctcag cctctgaata tgaacggtga gcattgtggc tgtcagcagg aagcaacgaa |
| 3481 | gggaaatgtc tttccttttg ctcttaagtt gtggagagtg caacagtagc ataggaccct |
| 3541 | accctctggg ccaagtcaaa gacattctga catcttagta tttgcatatt cttatgtatg |
| 3601 | tgaaagttac aaattgcttg aaagaaaata tgcatctaat aaaaaacacc ttctaaaata |
| 3661 | aaaaaaaaaa aaaaaaaaaa aaaaaa |

SEQ ID NO: 121 Human CCR5 Transcript Variant B cDNA Sequence
(NM_001100168.1; CDS: 123-1181)

| | |
|---|---|
| 1 | cttcagatag attatatctg gagtgaagaa tcctgccacc tatgtatctg gcatagtctc |
| 61 | atctggccag aagagctgag acatccgttc ccctacaaga aactctcccc gggtggaaca |
| 121 | agatggatta tcaagtgtca agtccaatct atgacatcaa ttattataca tcggagccct |
| 181 | gccaaaaaat caatgtgaag caaatcgcag cccgcctcct gcctccgctc tactcactgg |
| 241 | tgttcatctt tggttttgtg ggcaacatgc tggtcatcct catcctgata aactgcaaaa |
| 301 | ggctgaagag catgactgac atctacctgc tcaacctggc catctctgac ctgtttttcc |
| 361 | ttcttactgt ccccttctgg gctcactatg ctgccgccca gtgggacttt ggaaatacaa |
| 421 | tgtgtcaact cttgacaggg ctctatttta taggcttctt ctctggaatc ttcttcatca |
| 481 | tcctcctgac aatcgatagg tacctggctg tcgtccatgc tgtgtttgct ttaaaagcca |
| 541 | ggacggtcac ctttggggtg gtgacaagtg tgatcacttg ggtggtggct gtgtttgcgt |
| 601 | ctctcccagg aatcatcttt accagatctc aaaaagaagg tcttcattac acctgcagct |
| 661 | ctcattttcc atacagtcag tatcaattct ggaagaattt ccagacatta aagatagtca |
| 721 | tcttggggct ggtcctgccg ctgcttgtca tggtcatctg ctactcggga atcctaaaaa |
| 781 | ctctgcttcg gtgtcgaaat gagaagaaga ggcacagggc tgtgaggctt atcttcacca |
| 841 | tcatgattgt ttattttctc ttctgggctc cctacaacat tgtccttctc ctgaacacct |
| 901 | tccaggaatt ctttggcctg aataattgca gtagctctaa caggttggac caagctatgc |
| 961 | aggtgacaga gactcttggg atgacgcact gctgcatcaa ccccatcatc tatgcctttg |
| 1021 | tcggggagaa gttcagaaac tacctcttag tcttcttcca aaagcacatt gccaaacgct |
| 1081 | tctgcaaatg ctgttctatt ttccagcaag aggctcccga gcgagcaagc tcagtttaca |
| 1141 | cccgatccac tggggagcag gaaatatctg tgggcttgtg acacggactc aagtgggctg |
| 1201 | gtgacccagt cagagttgtg cacatggctt agttttcata cacagcctgg gctgggggtg |
| 1261 | gggtgggaga ggtctttttt aaaaggaagt tactgttata gagggtctaa gattcatcca |
| 1321 | tttatttggc atctgtttaa agtagattag atcttttaag cccatcaatt atagaaagcc |
| 1381 | aaatcaaaat atgttgatga aaaatagcaa cctttttatc tccccttcac atgcatcaag |
| 1441 | ttattgacaa actctccctt cactgrgaaa gttccttatg tatatttaaa agaaagcctc |
| 1501 | agagaattgc tgattcttga gtttagtgat ctgaacagaa ataccaaaat tatttcagaa |
| 1561 | atgtacaact ttttacctag tacaaggcaa catataggtt gtaaatgtgt ttaaaacagg |
| 1621 | tctttgtctt gctatgggga gaaaagacat gaatatgatt agtaaagaaa tgacactttt |
| 1681 | catgtgtgat ttcccctcca aggtatggtt aataagtttc actgacttag aaccaggcga |
| 1741 | gagacttgtg gcctgggaga gctggggaag cttcttaaat gagaagccat ttgagttgga |
| 1801 | tcatctattg ctggcaaaga cagaagcctc actgcaagca ctgcatgggc aagcttggct |
| 1861 | gtagaaggag acagagctgg ttgggaagac atggggagga aggacaaggc tagatcatga |
| 1921 | agaaccttga cggcattgct ccgtctaagt catgagctga gcagggagat cctggttgta |
| 1981 | gttgcagaag gtttactctg tggccaaagg agggtcagga aggatgagca tttagggcaa |
| 2041 | ggagaccacc aacagccctc aggtcagggt gaggatggcc tctgctaagc tcaaggcgtg |
| 2101 | aggatgggaa ggagggaggt attcgtaagc atgggaagga gggaggtatt cgtgcagcat |
| 2161 | atgaggatgc agagtcagca gaaactgggg ggatttgggt tggaagtgag ggtcagagag |
| 2221 | gagtcagaga gaatccctag tcttcaagca gattggagaa acccttgaaa agacatcaag |
| 2281 | cacagaagga ggaggaggag gtttaggtca agaagaagat ggattggtgt aaaaggatgg |
| 2341 | gtctggtttg cagagcttga acacagtctc acccagactc caggctgtct ttcactgaat |
| 2401 | gcttctgact tcatagattt ccttcccatc ccagctgaaa tactgagggg tctccaggag |
| 2461 | gagactagat ttatgaatac acgaggtatg aggtctagga acatacttca gctcacacat |
| 2521 | gagatctagg tgaggattga ttacctagta gtcatttcat gggttgttgg gaggattcta |
| 2581 | tgaggcaacc acaggcagca tttagcacat actacacatt caataagcat caaactctta |
| 2641 | gttactcatt cagggatagc actgagcaaa gcattgagca aaggggtccc atagaggtga |
| 2701 | gggaagcctg aaaaactaag atgctgcctg cccagtgcac acaagtgtag gtatcatttt |
| 2761 | ctgcatttaa ccgtcaatag gcaaaggggg gaagggacat attcatttgg aaataagctg |
| 2821 | ccttgagcct taaaacccac aaaagtacaa tttaccagcc tccgtatttc agactgaatg |
| 2881 | ggggtggggg gggcgcctta ggtacttatt ccagatgcct tctccagaca aaccagaagc |
| 2941 | aacagaaaaa atcgtctctc cctccctttg aaatgaatat accccttagt gtttgggtat |
| 3001 | attcatttca aagggagaga gagaggtttt tttctgttct gtctcatatg attgtgcaca |
| 3061 | tacttgagac tgttttgaat ttgggggatg gctaaaacca tcatagtaca ggtaaggtga |
| 3121 | gggaatagta agtggtgaga actactcagg gaatgaaggt gtcagaataa taagaggtgc |
| 3181 | tactgacttt ctcagcctct gaatatgaac ggtgagcatt gtggctgtca gcaggaagca |
| 3241 | acgaagggaa atgtctttcc tattgctctt aagttgtgga gagtgcaaca gtagcatagg |
| 3301 | accctaccct ctgggccaag tcaaagacat tctgacatct tagtatttgc atattcttat |
| 3361 | gtatgtgaaa gttacaaatt gcttgaaaga aaatatgcat ctaataaaaa acaccttcta |
| 3421 | aaataaaaaa aaaaaaaaaa aaaaaaaaaa a |

SEQ ID NO: 122 Human CCR5 Amino Acid Sequence (NP_000570.1 and
NP_001093638.1)

| | |
|---|---|
| 1 | mdyqvsspiy dinyytsepc qkinvkqiaa rllpplyslv fifgfvgnml vililinckr |
| 61 | lksmtdlyll nlaisdlffl ltvpfwahya aaqwdfgntm cqlltglyfi gffsgiffii |
| 121 | lltidrylav vhavfalkar tvtfgvvtsv itwvvavfas lpgiiftrsq keglhytcss |
| 181 | hfpysqyqfw knfqtlkivi lglvlpllvm vicvsgilkt llrcrnekkr hravrlifti |
| 241 | mivyflfwap ynivlllntf qeffglnncs ssnrldqamq vtetlgmthc cinpiiyafv |
| 301 | gekfrnyllv ffqkhiakrf ckccsifqqe aperassvyt rstgeqeisv gl |

SEQ ID NO: 123 Human EVI2B cDNA Sequence (NM_006495.3; CDS: 156-1502)

| | |
|---|---|
| 1 | agaaactatt tcagtttgct agaggaacat tttaaatctg aattgaacca cccattttcc |
| 61 | tttcttagcc aaatcaccaa aatgtccagt tagaacaaga atttagcatt ctgcaaaaga |
| 121 | agttaacagc tgagataacg aggaaatatt ctgaaatgga tcccaaatat ttcatcttaa |
| 181 | ttttgttttg tggacacctg aacaatacat ttttttcaaa gacagagaca attacaacag |
| 241 | agaagcagtc acagcctacc ttattcacat catcaatgtc acaggtattg gctaattctc |
| 301 | aaaacacaac agggaatcct ttgggtcaac caacacaatt cagcgacact ttttctggac |
| 361 | aatcaatatc acctgccaaa gtcactgctg gacaaccaac accagctgtc tatacctctt |
| 421 | ctgaaaaacc agaagcacat acttctgctg gacaaccact tgcctacaac accaaacaac |
| 481 | caacaccaat agccaacacc tcctcccagc aagccgtgtt cacctctgcc agacaactac |
| 541 | catctgcccg tacttctacc acacaaccac caaagtcatt tgtctatact tttactcaac |
| 601 | aatcatcatc tgtccagatc ccttctagaa aacaaataac tgttcataat ccatccacac |
| 661 | aaccaacatc aactgtcaaa aattcaccta ggagtacacc aggatttatc ttagatacta |
| 721 | ccagtaacaa acaaacccca caaaaaaaca attataattc aatagctgcc atactaattg |
| 781 | gtgtacttct gacttctatg ttggtagcta taatcatcat tgtactttgg aaatgcttaa |
| 841 | ggaaaccagt tttaaatgat caaaattggg caggtagatc tccatttgct gatggagaaa |
| 901 | cccctgacat ttgtatggat aacatcagag aaaatgaaat atccacaaaa cgtacatcaa |
| 961 | tcatttcact tacaccctgg aaaccaagca aaagcacact tttagcagat gacttagaaa |
| 1021 | ttaagttgtt tgaatcaagt gaaaacattg aagactccaa caaccccaaa acagagaaaa |
| 1081 | taaaagatca agtaaatggt acatcagaag atagtgctga tggttcaaca gttggaactg |
| 1141 | ctgtttcttc ttcagatgat gcagatctgc ctccaccacc tccccttctg gatttggaag |
| 1201 | gacaggaaag taaccaatct gacaaaccca caatgacaat tgtatctcct cttccaaatg |
| 1261 | attctactag tctccctcca tctctggact gtctcaatca agactgtgga gatcataaat |
| 1321 | ctgagataat acaatcattt ccaccgcttg actcacttaa cttgcccctg ccaccagtag |
| 1381 | attttatgaa aaaccaagaa gattccaacc ttgagatcca gtgtcaggag ttctctattc |
| 1441 | ctcccaactc tgatcaagat cttaatgaat ccctgccacc tccacctgca gaactgttat |
| 1501 | aaatattaca acttgctttt tagctgatct tccatcctca aatgactctt ttttctttat |
| 1561 | atgttaacat atataaaatg gcaactgata gtcaattttg atttttattc aggaactatc |
| 1621 | tgaaatctgc tcagagccta tgtgcataga tgaaactttt ttttaaaaaa agttatttaa |
| 1681 | cagtaatcta tttactaatt atagtaccta tctttaaagt atagtacatt ttacatatgt |
| 1741 | aaatggtatg tttcaataat ttaagaactc tgaaacaatc tacatatact tattacccag |
| 1801 | tacagttttt tttcccctga aaagctgtgt ataaaattat ggtgaataaa cttttatgtt |
| 1861 | tccatttcaa agaccagggt ggagaggaat aagagactaa gtatatgctt caagttttaa |
| 1921 | attaatacct caagtattaa ataaatattc caagtttgtg ggaatgggag attaaaatgc |
| 1981 | atgtttgaga atagaaaaaa aaaaaaaaa |

SEQ ID NO: 124 Human EVI2B Amino Acid Sequence (NP_006486.3)

| | |
|---|---|
| 1 | mdpkyfilil fcghlnntff sktetittek qsqptlftss msqvlansqn ttgnplgqpt |
| 61 | qfsdtfsgqs ispakvtagq ptpavytsse kpeahtsagq playntkqpt piantssqqa |
| 121 | vftsarqlps artsttqppk sfvytftqqs ssvqipsrkq itvhnpstqp tstvknsprs |
| 181 | tpgfildtts nkqtpqknny nsiaailigv lltsmlvaii iivlwkclrk pvlndqnwag |
| 241 | rspfadgetp dicmdniren eistkrtsii sltpwkpsks tlladdleik lfessenied |
| 301 | snnpktekik dqvngtseds adgstvgtav sssddadlpp ppplldlegq esnqsdkptm |
| 361 | tivsplpnds tslppsldcl nqdcgdhkse iiqsfpplds lnlplppvdf mknqedsnle |
| 421 | iqcqefsipp nsdqdlnesl ppppaell |

SEQ ID NO: 125 Mouse EVI2B cDNA Sequence (NM_001077496.1; CDS: 167-1501)

| | |
|---|---|
| 1 | tactgataaa cttcctctgc tgcacagaag ccgtctcagt gcgctggaga ccaccgttaa |
| 61 | tccgcactga aacacccctt tgctctctca gccaaatcac caacatgtcc tgttagaaca |
| 121 | agaatttaca ttctgcgaaa gaagttcaca ggagaaaaca tctgaaatgg aattcaagta |
| 181 | tctggtcttc attgtgcttt gtcaatacct ggacaatacg tttttctcag agacagaagc |
| 241 | aattacaaca gagcagcaat cactgtctac tttaatcaca ccgtcgttat atgttacaac |
| 301 | tgattctcaa aacacagcag ggaatgcttt gagtcagaca acaagattca agaacatttc |
| 361 | ttctggacag caagcatcac ctgcccaaat cactcctgaa caagcaacac cagctgttta |
| 421 | tgtctcttca agcccactta cttataacat taccagacaa gcagaatcag cggtcaacaa |
| 481 | ctccttgcct caaacatcac catctgggtt cactttgacc aatcagccat caccttctac |
| 541 | ctataattct actggacaac caccaaaaca tcttgtctat acttccacac aacagccacc |
| 601 | atcacctgct cctacctctt ctggaaaacc agaagtagag tctactcata atcagcccac |
| 661 | aaaatcaaca ccaactattt atttacaaag ggacacacca ccaccaccac caccaccact |
| 721 | cacttcagaa ccaccaagtg gcaaaggaac tgctcataaa aacaaccaca atgcaattgc |
| 781 | tgccatatta atcggtacta ttataatttc tatgttggta gctatactca tgattatact |
| 841 | gtggaaatac ttgaggaagc cagtcttaaa tgatcaaaac tgggcaggta ggtctccatt |
| 901 | tgctgatgga gaaacaccag aaatgtgtat ggataacatc agagagagtg aggcatccac |
| 961 | aaagcgtgca tcagttgtct cacttatgac ctggaaacca agtaaaagca cactgctagc |
| 1021 | agatgattta gaagttaagt tgtttgaatc aagtgaacac attaatgata ccagcaacct |
| 1081 | caagactgat aatgtagaag ttcaaataaa tggcttatca gaagacagtg ctgatgggtc |
| 1141 | aacagttggt acagccgtgt cttcagatga tgcagatctg gccctgccac ctccccttct |
| 1201 | tgatttggat gagaacctac caaacaagcc cacagtgaca gttgtatctc ctttaccaaa |
| 1261 | tgattctatc aatccccaac catctccaga tggtctaaat caagtgtgtg aagaacagca |
| 1321 | ttccaagatc caagagccat tcccgccacc ccctgactca tttaatgtgc ctctgtcagc |
| 1381 | aggagatttt ataaacaatc aagagtcggc ccacgaggct caatgccagg agttctctac |
| 1441 | tcctgacctc catccagacc tcacagactc cctgccacct ccacctacag agctgctgta |
| 1501 | aagtgacagc tggctttcta gactgccctc catcctgaga tggcaccgac acgttcctgt |
| 1561 | cttcgtggta tggcacacag gacatgacac ctggcacctg agagactctt tagggactac |
| 1621 | ctgacccctg actgaagccc acgtacacgg gtagattatt acagtggtat gcttaccagc |
| 1681 | tacagaagta atttttaaat cagagtgcct tttatatatg ttaatgatag atatttcaat |
| 1741 | aacttaatca ctttggaaac atatgatcta catatactta ttattaccca atagatttcc |
| 1801 | cccgaaaagc tgtatataaa catatcttaa ataaataaaa ttctattttt tccacctcaa |
| 1861 | aatttggggt ataataaaaa tggaaatttt taaatggtca aagttttaat acttcaaata |
| 1921 | ttaagtaaat attttcattt atagagatta aacacacagc taccaaactg tattaaaaca |
| 1981 | tgaagtctga gtgctgtgtt tgggatacat ttaccctgaa aaagtgagca cttaccataa |
| 2041 | aattttcttt tttctttata attaaaaatt ttatgtatat aagagttttg cctgaatatg |
| 2101 | tgtgtatata ttcatatagt cacacacaca cacatatata taagacagaa gatggcacta |
| 2161 | ctaacatttg ccaatgcccc gtgagtacct gaactgactc caagtcctct gtaagtgctc |
| 2221 | ttaaccaccg agcccctgca actccgttct tcccctcctc ttcctcctcc tcctcttcct |
| 2281 | cctcctcttc ctcttcaaat gtttggggcg tgggggtgga ggtcaaagag ataggctgta |
| 2341 | tttggggtta gaagatgact tgtgggagtt gatttttttc ttccacctca aggataaaat |
| 2401 | tcagaactca agtcatgaga cctgacagca agcaaccttt atcctctaag cccatctcac |
| 2461 | tgcccccaaa atgtaaacat ttttctaaaa tgttagggaa gcataaacta accacttaga |
| 2521 | caaaaatcaa atgatatgga agacgggaga aaaaaataga agtgggctgt atctgtgtgt |
| 2581 | ctcttcccac acatgcatga taccagcctg tgtgagggtg tctgtggaga ccacagagga |
| 2641 | taccagccat cctggaactg aagtcccagg aagttatgag ctgctgtcta acacgggtac |
| 2701 | tgggaactga acttgggtcc tataggacag cagcaagttc tctaaagtac tgacccatca |
| 2761 | ctgcagcccc agcctccttt tgtaaatgca ggaatgtaat catcacctga aggttgttga |
| 2821 | gtatgaggca ctcagaacag aagtgggcac aacttttgtt aaagtggagg cggcagtggg |
| 2881 | tactggccta ccttttgcag atgtcaaatg ttcatctgcc caacaagcca tccttctctt |
| 2941 | attattatta caagtccaag aaaggacagt tgcttagagc acagattttg gcacttttca |
| 3001 | agatagtata tagtatttat tggtaacatt aatgttcaaa tactaaaaat cccatgtaga |
| 3061 | ataaaaacaa gaaggttctc gggcagtgga gttttactac tactgctact attactacta |
| 3121 | catactacta ctattattta gtatataatt atcaataaac aattattata catattataa |
| 3181 | atacatgtaa atttattatt gttgttgttt gtgttctgag acaggagtcc tctggtagcc |
| 3241 | ctggctgtcc tggcactctc tctctataga cccactgtcc tcaaactcac agatacacct |
| 3301 | gccfactgtc cccaatcttt gtgattaacg gtgtgacctt taaacacctt aaaagacact |
| 3361 | gggcttaagt gttattttac atacaatact taccttactt cttacaagcc acctcttact |
| 3421 | gataacactt tttttatcta cagaaacacc tacttcaagc atgatggcgt ttcattttat |
| 3481 | tacattggtt cttttctgtc attcacaata aaatttctca cgtgtcttc |

SEQ ID NO: 126 Mouse EVI2B Amino Acid Sequence (NP_001070964.1)

| | |
|---|---|
| 1 | mefkylvfiv lcqyldntff seteaitteq qslstlitps lyvttdsqnt agnalsqttr |
| 61 | fknissgqqa spaqitpeqa tpavyvsssp ltynitrqae savnnslpqt spsgftltnq |
| 121 | pspstynstg qppkhlvyts tqqppspapt ssgkpevest hnqptkstpt iylqrdtppp |
| 181 | ppppltsepp sgkgtahknn hnaiaailig tiiismlvai lmiilwkylr kpvindqnwa |
| 241 | grspfadget pemcmdnire seastkrasv vslmtwkpsk stlladdlev klfessehin |
| 301 | dtsnlktdnv evqinglsed sadgstvgta vssddadlal ppplldlden lpnkptvtvv |
| 361 | splpndsinp qpspdglnqv ceeqhskiqe pfppppdsfn vplsagdfin nqesaheaqc |
| 421 | qefstpdlhp dltdslpppp tell |

SEQ ID NO: 127 Human CLEC7A Transcript Variant 1 cDNA Sequence
(NM_197947.2; CDS: 188-931)

| | |
|---|---|
| 1 | agcatagttt catttcctgc tcttgaatat ctggttgaac tacttaagct taatttgtta |
| 61 | aactccggta agtacctagc ccacatgatt tgactcagag attctctttt gtccacagac |
| 121 | agtcatctca ggagcagaaa gaaaagagct cccaaatgct atatctattc aggggctctc |
| 181 | aagaacaatg gaatatcatc ctgatttaga aaatttggat gaagatggat atactcaatt |
| 241 | acacttcgac tctcaaagca ataccaggat agctgttgtt tcagagaaag gatcgtgtgc |
| 301 | tgcatctcct ccttggcgcc tcattgctgt aattttggga atcctatgct tggtaatact |
| 361 | ggtgatagct gtggtcctgg gtaccatggc tatttggaga tccaattcag gaagcaacac |
| 421 | attggagaat ggctactttc tatcaagaaa taaagagaac cacagtcaac ccacacaatc |
| 481 | atctttagaa gacagtgtga ctcctaccaa agctgtcaaa accacagggg ttctttccag |
| 541 | cccttgtcct cctaattgga ttatatatga gaagagctgt tatctattca gcatgtcact |
| 601 | aaattcctgg gatggaagta aaagacaatg ctggcaactg ggctctaatc tcctaaagat |
| 661 | agacagctca aatgaattgg gatttatagt aaaacaagtg tcttcccaac ctgataattc |
| 721 | attttggata ggcctttctc ggccccagac tgaggtacca tggctctggg aggatggatc |
| 781 | aacattctct tctaacttat ttcagatcag aaccacagct acccaagaaa acccatctcc |
| 841 | aaattgtgta tggattcacg tgtcagtcat ttatgaccaa ctgtgtagtg tgccctcata |
| 901 | tagtatttgt gagaagaagt tttcaatgta agaggaaggg tggagaagga gagagaaata |
| 961 | tgtgaggtag taaggaggac agaaaacaga aaagaaaaga gtaacagctg aggtcaagat |
| 1021 | aaatgcagaa aatgtttaga gagcttggcc aactgtaatc ttaaccaaga aattgaaggg |
| 1081 | agaggctgtg atttctgtat ttgtcgacct acaggtaggc tagtattatt tttctagtta |
| 1141 | gtagatccct agacatggaa tcagggcagc caagattgag tttttatttt ttatttattt |
| 1201 | atttttttga gatagggtct cactttgtta cccaggctgg agtgcagtgg cacaatctcg |
| 1261 | actcactgca gctatctctc gcctcagccc ctcaagtagc tgggactaca ggtgcatgcc |
| 1321 | accatgccag gctaattttt ggtgtttttt gtagagactg ggttttgcca tgttgaccaa |
| 1381 | gctggtctct aactcctggg cttaagtgat ctgcccgcct tggcctccca aagtgctggg |
| 1441 | attacagatg tgagccacca cacctggccc caagcttgaa ttttcattct gccattgact |
| 1501 | tggcatttac cttgggtaag ccataagcga atcttaattt ctggctctat cagagttgtt |
| 1561 | tcatgctcaa caatgccatt gaagtgcacg gtgtgttgcc acgatttgac cctcaacttc |
| 1621 | tagcagtata tcagttatga actgagggtg aaatatattt ctgaatagct aaatgaagaa |
| 1681 | atgggaaaaa atattcacca cagtcagagc aattttatta ttttcatcag tatgatcata |
| 1741 | attatgatta tcatcttagt aaaaagcagg aactcctact ttttctttat caattaaata |
| 1801 | gctcagagag tacatctgcc atatctctaa tagaatcttt tttttttttt ttttttttga |
| 1861 | gacagagttt cgctcttgtt gcccaggctg gagtgcaacg gcacgatctc ggctcaccgc |
| 1921 | aacctccgcc ccctgggttc aagcaattct cctgcctcag cctcccaagt agctgggatt |
| 1981 | acagtcaggc accaccacac ccggctaatt ttgtattttt ttagtagaga cagggtttct |
| 2041 | ccatgtcggt cagggtagtc ccgaactcct gacctcaagt gatctgcctg cctcggcctc |
| 2101 | ccaagtgctg ggattacagg cgtgagccac tgcacccagc ctagaatctt gtataatatg |
| 2161 | taattgtagg gaaactgctc tcataggaaa gttttctgct ttttaaatac aaaaatacat |
| 2221 | aaaaatacat aaaatctgat gatgaatata aaaaagtaac caacctcatt ggaacaagta |
| 2281 | ttaacatttt ggaatatgtt ttattagttt tgtgatgtac tgttttacaa tttttaccat |
| 2341 | ttttttcagt aattactgta aaatggtatt attggaatga aactatattt cctcatgtgc |
| 2401 | tgatttgtct tatttttttc atactttccc actggtgcta tttttatttc caatggatat |
| 2461 | ttctgtatta ctagggaggc atttacagtc ctctaatgtt gattaatatg tgaaaagaaa |
| 2521 | ttgtaccaat tttactaaat tatgcagttt aaaatggatg attttatgtt atgtggattt |
| 2581 | catttcaata aaaaaaaact cttatcaaaa aaaaaaaaaa aa |

SEQ ID NO: 128 Human CLEC7A Isoform A Amino Acid Sequence (NP_922938.1)

| | |
|---|---|
| 1 | meyhpdlenl dedgytqlhf dsqsntriav vsekgscaas ppwrliavil gilclvilvi |
| 61 | avvlgtmaiw rsnsgsntle ngyflsrnke nhsqptqssl edsvtptkav kttgvlsspc |
| 121 | ppnwiiyeks cylfsmslns wdgskrqcwq lgsnllkids snelgfivkq vssqpdnsfw |
| 181 | iglsrpqtev pwlwedgstf ssnlfqirtt atqenpspnc vwihvsviyd qlcsvpsysi |
| 241 | cekkfsm |

SEQ ID NO: 129 Human CLEC7A Transcript Variant 2 cDNA Sequence
(NM_022570.4; CDS: 188-793)

| | |
|---|---|
| 1 | agcatagttt catttcctgc tcttgaatat ctggttgaac tacttaagct taatttgtta |
| 61 | aactccggta agtacctagc ccacatgatt tgactcagag attctctttt gtccacagac |
| 121 | agtcatctca ggagcagaaa gaaaagagct cccaaatgct atatctattc aggggctctc |
| 181 | aagaacaatg gaatatcatc ctgatttaga aaatttggat gaagatggat atactcaatt |
| 241 | acacttcgac tctcaaagca ataccaggat agctgttgtt tcagagaaag gatcgtgtgc |
| 301 | tgcatctcct ccttggcgcc tcattgctgt aattttggga atcctatgct tggtaatact |
| 361 | ggtgatagct gtggtcctgg gtaccatggg ggttatttcc agcccttgtc ctcctaattg |
| 421 | gattatatat gagaagagct gttatctatt cagcatgtca ctaaattcct gggatggaag |
| 481 | taaaagacaa tgctggcaac tgggctctaa tctcctaaag atagacagct caaatgaatt |
| 541 | gggatttata gtaaaacaag tgtcttccca acctgataat tcattttgga taggcctttc |
| 601 | tcggccccag actgaggtac catggctctg ggaggatgga tcaacattct cttctaactt |
| 661 | atttcagatc agaaccacag ctacccaaga aaacccatct ccaadttgtg tatggattca |
| 721 | cgtgtcagtc atttatgacc aactgtgtag tgtgccctca tatagtattt gtgagaagaa |
| 781 | gttttcaatg taagaggaag ggtggagaag gagagagaaa tatgtgaggt agtaaggagg |
| 841 | acagaaaaca gaacagaaaa gagtaacagc tgaggtcaag ataaatgcag aaaatgttta |
| 901 | gagagcttgg ccaactgtaa tcttaaccaa gaaattgaag ggagaggctg tgatttctgt |
| 961 | atttgtcgac ctacaggtag gctagtatta tttttctagt tagtagatcc ctagacatgg |
| 1021 | aatcagggca gccaagcttg agtttttatt ttttatttat ttattttttt gagatagggt |
| 1081 | ctcactttgt tacccaggct ggagtgcagt ggcacaatct cgactcactg cagctatctc |
| 1141 | tcgcctcagc ccctcaagta gctgggacta caggtgcatg ccaccatgcc aggctaattt |
| 1201 | ttggtgtttt ttgtagagac tgggttttgc catgttgacc aagctggtct ctaactcctg |
| 1261 | ggcttaagtg atctgcccgc cttggcctcc caaagtgctg ggattacaga tgtgagccac |
| 1321 | cacacctggc cccaagcttg aattttcatt ctgccattga cttggcattt accttgggta |
| 1381 | agccataagc gaatcttaat ttctggctct atcagagttg tttcatgctc aacaatgcca |
| 1441 | ttgaagtgca cggtgtgttg ccacgatttg accctcaact tctagcagta tatcagttat |
| 1501 | gaactgaggg tgaaatatat ttctgaatag ctaaatgaag aaatgggaaa aaatcttcac |
| 1561 | cacagtcaga gcaattttat tattttcatc agtatgatca taattatgat tatcatctta |
| 1621 | gtaaaaagca ggaactccta ctttttcttt atcaattaaa tagctcagag agtacatctg |
| 1681 | ccatatctct aatagaatct tttttttttt tttttttttt gagacagagt ttcgctcttg |
| 1741 | ttgcccaggc tggagtgcaa cggcacgatc tcggctcacc gcaacctccg ccccctgggt |
| 1801 | tcaagcaatt ctcctgcctc agcctcccaa gtagctggga ttacagtcag gcaccaccac |
| 1861 | acccggctaa ttttgtattt ttttagtaga gacagggttt ctccatgtcg gtcagggtag |
| 1921 | tcccgaactc ctgacctcaa gtgatctgcc tgcctcggcc tcccaagtgc tgggattaca |
| 1981 | ggcgtgagcc actgcaccca gcctagaatc ttgtataata tgtaattgta gggaaactgc |
| 2041 | tctcatagga aagttttctg ctttttaaat acaaaaatac ataaaaatac ataaaatctg |
| 2101 | atgatgaata taaaaaagta accaacctca ttggaacaag tattaacatt ttggaatatg |
| 2161 | ttttattagt tttgtgatgt actgttttac aatttttacc atttttttca gtaattactg |
| 2221 | taaaatggta ttattggaat gaaactatat ttcctcatgt gctgatttgt cttatttttt |
| 2281 | tcatactttc ccactggtgc tatttttatt tccaatggat atttctgtat tactagggag |
| 2341 | gcatttacag tcctctaatg ttgattaata tgtgaaaaga aattgtacca attttactaa |
| 2401 | attatgcagt ttaaaatgga tgattttatg ttatgtggat ttcatttcaa taaaaaaaaa |
| 2461 | ctcttatcaa aaaaaaaaaa aaaa |

SEQ ID NO: 130 Human CLEC7A Isoform B Amino Acid Sequence (NP_072092.2)

| | |
|---|---|
| 1 | meyhpdlenl dedgytqlhf dsqsntriav vsekgscaas ppwrliavil gilcivilvi |
| 61 | avvlgtmgvl sspcppnwii yekscylfsm slnswdgskr qcwqlgsnll kidssnelgf |
| 121 | ivkqvssqpd nsfwiglsrp qtevpwlwed gstfssnlfq irttatqenp spncywihvs |
| 181 | viydqlcsvp sysicekkfs m |

SEQ ID NO: 13 Human CLEC7A Transcript Variant 3 cDNA Sequence
(NM_197948.2; CDS: 188-757)

| | |
|---|---|
| 1 | agcatagttt catttcctgc tcttgaatat ctggttgaac tacttaagct taatttgtta |
| 61 | aactccggta agtacctagc ccacatgatt tgactcagag attctctttt gtccacagac |
| 121 | agtcatctca ggagcagaaa gaaaagagct cccaaatgct atatctattc aggggctctc |
| 181 | aagaacaatg gaatatcatc ctgatttaga aaatttggat gaagatggat atactcaatt |
| 241 | acacttcgac tctcaaagca ataccaggat agctgttgtt tcagagaaag gatcgtgtgc |
| 301 | tgcatctcct ccttggcgcc tcattgctgt aattttggga atcctatgct tggtaatact |
| 361 | ggtgatagct gtggtcctgg gtaccatggc tatttggaga tccaattcag gaagcaacac |
| 421 | attggagaat ggctactttc tatcaagaaa taaagagaac cacagtcaac ccacacaatc |
| 481 | atctttagaa gacagtgtga ctcctaccaa agctgtcaaa accacagggg ttctttccag |
| 541 | cccttgtcct cctaattgga ttatatatga gaagagctgt tatctattca gcatgtcact |
| 601 | aaattcctgg gatggaagta aaagacaatg ctggcaactg ggctctaatc tcctaaagat |
| 661 | agacagctca aatgaattga tttcagatca gaaccacagc tacccaagaa aacccatctc |
| 721 | caaattgtgt atggattcac gtgtcagtca tttatgacca actgtgtagt gtgccctcat |
| 781 | atagtatttg tgagaagaag ttttcaatgt aagaggaagg gtggagaagg agagagaaat |
| 841 | atgtgaggta gtaaggagga cagaaaacag aacagaaaag agtaacagct gaggtcaaga |
| 901 | taaatgcaga aaatgtttag agagcttggc caactgtaat cttaaccaag aaattgaagg |
| 961 | gagaggctgt gatttctgta tttgtcgacc tacaggtagg ctagtattat ttttctagtt |
| 1021 | agtagatccc tagacatgga atcagggcag ccaagcttga gtttttattt tttatttatt |
| 1081 | tatttttttg agatagggtc tcactttgtt acccaggctg gagtgcagtg gcacaatctc |
| 1141 | gactcactgc agctatctct cgcctcagcc cctcaagtag ctgggactac aggtgcatgc |
| 1201 | caccatgcca ggctaatttt tggtgttttt tgtagagact gggttttgcc atgttgacca |
| 1261 | agctggtctc taactcatgg gcttaagtga tctgcccgcc ttggcctccc aaagtgctgg |
| 1321 | gattacagat gtgagccacc acacgtggcc ccaagcttga attttcattc tgccattgac |
| 1381 | ttggcattta ccttgggtaa gccataagcg aatcttaatt tctggctcta tcagagttgt |
| 1441 | ttcatgctca acaatgccat tgaagtgcac ggtgtgttgc cacgatttga ccatcaactt |
| 1501 | ctagcagtat atcagttatg aactgagggt gaaatatatt tctgaatagc taaatgaaga |
| 1561 | aatgggaaaa aatcttcacc acagtcagag caattttatt attttcatca gtatgatcat |
| 1621 | aattatgatt atcatcttag taaaaagcag gaactcctac tttttcttta tcaattaaat |
| 1681 | agctcagaga gtacatctgc catatctcta atagaatctt tttttttttt tttttttttg |
| 1741 | agacagagtt tcgctcttgt tgcccaggct ggagtgcaac ggcacgatct cggctcaccg |
| 1801 | caacctccgc cccctgggtt caagcaattc tcctgcctca gcctcccaag tagctgggat |
| 1861 | tacagtcagg caccaccaca cccggctaat tttgtatttt tttagtagag acagggtttc |
| 1921 | tccatgtcgg tcagggtagt cccgaactcc tgacctcaag tgatctgcct gcctcggcct |
| 1981 | cccaagtgct gggattacag gagtgagcca ctgcacccag cctagaatct tgtataatat |
| 2041 | gtaattgtag ggaaactgct ctcataggaa agttttctgc tttttaaata caaaaataca |
| 2101 | taaaaataca taaaatctga tgatgaatat aaaaaagtaa ccaacctcat tggaacaagt |
| 2161 | attaacattt tggaatatgt tttattagtt ttgtgatgta ctgttttaca atttttacca |
| 2221 | tttttttcag taattactgt aaaatggtat tattggaatg aaactatatt tcctcatgtg |
| 2281 | ctgatttgtc ttattttttt catactttcc cactggtgct atttttattt ccaatggata |
| 2341 | tttctgtatt actagggagg catttacagt cctctaatgt tgattaatat gtgaaaagaa |
| 2401 | attgtaccaa ttttactaaa ttatgcagtt taaaatggat gattttatgt tatgtggatt |
| 2461 | tcatttcaat aaaaaaaaac tcttatcaaa aaaaaaaaaa aaa |

SEQ ID NO: 132 Human CLEC7A Isoform C Amino Acid Sequence (NP_922939.1)

| | |
|---|---|
| 1 | meyhpdlenl dedgytqlhf dsqsntriav vsekgscaas ppwrliavil gilclvilvi |
| 61 | avvlgtmaiw rsnsgsntle ngyflsrnke nhsqptqssl edsvtptkav kttgvlsspc |
| 121 | ppnwiiyeks cylfsmslns wdgskrqcwq lgsnllkids snelisdqnh syprkpiskl |
| 181 | cmdsrvshl |

SEQ ID NO: 133 Human CLEC7A Transcript Variant 4 cDNA Sequence
(NM_197949.2)

| | |
|---|---|
| 1 | agcatagttt catttcctgc tcttgaatat ctggttgaac tacttaagct taatttgtta |
| 61 | aactccggta agtacctagc ccacatgatt tgactcagag attctctttt gtccacagac |
| 121 | agtcatctca ggagcagaaa gaaaagagct cccaaatgct atatctattc aggggctctc |
| 181 | aagaacaatg gaatatcatc ctgatttaga aaatttggat gaagatggat atactcaatt |
| 241 | acacttcgac tctcaaagca ataccaggat agctgttgtt tcagagaaag gatcgtgtgc |
| 301 | tgcatctcct ccttggcgcc tcattgctgt aattttggga atcctatgct tggtaatact |
| 361 | ggtgatagct gtggtcctgg gtaccatggg ggttctttcc agcccttgtc ctcctaattg |
| 421 | gattatatat gagaagagct gttatctatt cagcatgtca ctaaattcct gggatggaag |
| 481 | taaaagacaa tgctggcaac tgggctctaa tctcctaaag atagacagct caaatgaatt |
| 541 | gatttcagat cagaaccaca gctacccaag aaaacccatc tccaaattgt gtatggattc |
| 601 | acgtgtcagt catttatgac caactgtgta gtgtgccctc atatagtatt tgtgagaaga |
| 661 | agttttcact gtaagaggaa gggtggagaa ggagagagaa atatgtgagg tagtaaggag |
| 721 | gacagaaaac agaacagaaa agagtaacag ctgaggtcaa gataaatgca gaaaatgttt |
| 781 | agagagcttg gccaactgta atcttaacca agaaattgaa gggagaggct gtgatttctg |
| 841 | tatttgtcga cctacaggta ggctagtatt atttttctag ttagtagatc cctagacatg |
| 901 | gaatcagggc agccaagctt gagtttttat tttttattta tttatttttt tgagataggg |
| 961 | tctccctttg ttacccaggc tggagtgcag tggcacaatc tcgactcact gcagctatct |
| 1021 | ctcgcctcag cccctcaagt agctgggact acaggtgcat gccaccatgc caggctaatt |
| 1081 | tttggtgttt tttgtagaga ctgggttttg ccatgttgac caagctggtc tctaactcct |
| 1141 | gggcttaagt gatctgcccg ccttggcctc ccaaagtgct gggattacag atgtgagcca |
| 1201 | ccacacctgg ccccaagctt gacttttcat tctgccattg acttggcatt taccttgggt |
| 1261 | aagccataag cgaatcttaa tttctggctc tatcagagtt gtttcatgct caacaatgcc |
| 1321 | attgaagtgc acggtgtgtt gccacgattt gaccctcaac ttctagcagt atatcagtta |
| 1381 | tgaactgagg gtgaaatata tttctgaata gctaaatgaa gaaatgggaa aaaatcttca |
| 1441 | ccacagtcag agcaatttta ttattttcat cagtatgatc ataattatga ttatcatctt |
| 1501 | agtaaaaagc aggaactcct actttttctt tatcaattaa atagctcaga gagtacctct |
| 1561 | gccatatctc taatagaatc tttttttttt tttttttttt tgagacagag tttcgctctt |
| 1621 | gttgcccagg ctggagtgca acggcccgat ctcggctcac cgcaacctcc gccccctggg |
| 1681 | ttcaagcaat tctcctgcct cagcctccca agtagctggg attacagtca ggcaccacca |
| 1741 | cacccggcta attttgtatt tttttagtag agacagggtt tctccatgtc ggtcagggta |
| 1801 | gtcccgaact cctgacctca agtgatctgc ctgcctcggc ctcccaagtg ctgggattac |
| 1861 | aggcgtgagc cactgcaccc agcctagaat cttgtataat atgtaattgt agggaaactg |
| 1921 | ctctcatagg aaagttttct gctttttaaa tacaaaaata cataaaaata cataaaatct |
| 1981 | gatgatgaat ataaaaaagt aaccaacctc attggaacaa gtattaacat tttggaatat |
| 2041 | gttttattag ttttgtgatg tactgtttta caatttttac catttttttc agtaattact |
| 2101 | gtaaaatggt attattggaa tgaaactata tttcctcatg tgctgatttg tcttattttt |
| 2161 | ttcatacttt cccactggtg ctatttttat ttccaatgga tatttctgta ttactaggga |
| 2221 | ggcatttaca gtcctctaat gttgattaat atgtgaaaag aaattgtacc aattttacta |
| 2281 | aattatgcag tttaaaatgg atgattttat gttatgtgga tttcatttca ataaaaaaaa |
| 2341 | actcttatca aaaaaaaaaa aaaaa |

SEQ ID NO: 134 Human CLEC7A Isoform D Amino Acid Sequence (NP_922940.1)

| | |
|---|---|
| 1 | meyhpdlenl dedgytqlhf dsqsntriav vsekgscaas ppwrliavil gilclvilvi |
| 61 | avvlgtmgvl sspcppnwii yekscylfsm slnswdgskr qcwqlgsnll kidssnelis |
| 121 | dcmhsyprkp isklcmdsrv shl |

SEQ ID NO: 135 Human CLEC7A Transcript Variant 5 cDNA Sequence
(NM_197950.2; CDS: 188-694)

| | |
|---|---|
| 1 | agcatagttt catttcctgc tcttgaatat ctggttgaac tacttaagct taatttgtta |
| 61 | aactccggta agtacctagc ccacatgatt tgactcagag attctctttt gtccacagac |
| 121 | agtcatctca ggagcagaaa gaaaagagct cccaaatgct atatctattc aggggctctc |
| 181 | aagaacaatg gaatatcatc ctgatttaga aaatttggat gaagatggat atactcaatt |
| 241 | acacttcgac tctcaaagca ataccaggat agctgttgtt tcagagaaag gggttctttc |
| 301 | cagcccttgt cctcctaatt ggattatata tgagaagagc tgttatctat tcagcatgtc |
| 361 | actaaattcc tgggatggaa gtaaaagaca atgctggcaa ctgggctcta atctcctaaa |
| 421 | gatagacagc tcaaatgaat tgggatttat agtaaaacaa gtgtcttccc aacctgataa |
| 481 | ttcattttgg ataggccttt ctcggcccca gactgaggta ccatggctct gggaggatgg |
| 541 | atcaacattc tcttctaact tatttcagat cagaaccaca gctacccaag aaaacccatc |
| 601 | tccaaattgt gtatggattc acgtgtcagt catttatgac caactgtgta gtgtgccctc |
| 661 | atatagtatt tgtgagaaga agttttcaat gtaagaggaa gggtggagaa ggagagagaa |
| 721 | atatgtgagg tagtaaggag gacagaaaac agaacagaaa agagtaacag ctgaggtcaa |
| 781 | gataaatgca gaaaatgttt agagagcttg gccaactgta atcttaacca agaaattgaa |
| 841 | gggagaggct gtgatttctg tatttgtcga cctacaggta ggctagtatt atttttctag |
| 901 | ttagtagatc cctagacatg gaatcagggc agccaagctt gagtttttat tttttattta |
| 961 | tttatttttt tgagataggg tctcactttg ttacccaggc tggagtgcag tggcacaatc |
| 1021 | tcgactcact gcagctatct ctcgcctcag cccctcaagt agctgggact acaggtgcat |
| 1081 | gccaccatgc caggctaatt tttggtgttt tttgtagaga ctgggttttg ccatgttgac |
| 1141 | caagctggtc tctaactcct gggcttaagt gatctgcccg ccttggcctc ccaaagtgct |
| 1201 | gggattacag atgtgagcca ccacacctgg ccccaagctt gaattttcat tctgccattg |
| 1261 | acttggcatt taccttgggt aagccataag cgaatcttaa tttctggctc tatcagagtt |
| 1321 | gtttcatgct caacaatgcc attgaagtgc acggtgtgtt gccacgattt gaccctcaac |
| 1381 | ttctagcagt atatcagtta tgaactgagg gtgaaatata tttctgaata gctaaatgaa |
| 1441 | gaaatgggaa aaaatcttca ccacagtcag agcaatttta ttattttcat cagtatgatc |
| 1501 | ataattatga ttatcatctt agtaaaaagc aggaactcct actttttctt tatcaattaa |
| 1561 | atagctcaga gagtacatct gccatatctc taatagaatc tttttttttt tttttttttt |
| 1621 | tgagacagag tttcgctctt gttgcccagg ctggagtgca acggcacgat ctcggctcac |
| 1681 | cgcaacctcc gccccctggg ttcaagcaat tctcctgcct cagcctccca agtagctggg |
| 1741 | attacagtca ggcaccacca cacccggcta attttgtatt tttttagtag agacagggtt |
| 1801 | tctccatgtc ggtcagggta gtcccgaact cctgacctca agtgatctgc ctgcctcggc |
| 1861 | ctcccaagtg ctgggattac aggcgtgagc cactgcaccc agcctagaat cttgtataat |
| 1921 | atgtaattgt agggaaactg ctctcatagg aaagttttct gctttttaaa tacaaaaata |
| 1981 | cataaaaata cataaaatct gatgatgaat ataaaaaagt aaccaacctc attggaacaa |
| 2041 | gtattaacat tttggaatat gttttattag ttttgtgatg tactgtttta caatttttac |
| 2101 | catttttttc agtaattact gtaaaatggt attattggaa tgaaactata tttcctcatg |
| 2161 | tgctgatttg tcttattttt ttcatacttt cccactggtg ctatttttat ttccaatgga |
| 2221 | tatttctgta ttactaggga ggcatttaca gtcctctaat gftgattaat atgtgaaaag |
| 2281 | aaattgtacc aattttacta aattatgcag tttaaaatgg atgattttat gttatgtgga |
| 2341 | tttcatttca ataaaaaaaa actcttatca aaaaaaaaaa aaaaa |

SEQ ID NO: 136 Human CLEC7A Isoform E Amino Acid Sequence (NP_922941.1)

| | |
|---|---|
| 1 | meyhpdlenl dedgytqlhf dsqsntriav vsekgvlssp cppnwiiyek scylfsmsln |
| 61 | swdgskrqcw qlgsnllkid ssnelgfivk qvssqpdnsf wiglsrpqte vpwlwedgst |
| 121 | fssnlfqirt tatqenpspn cvwihvsviy dqlcsvpsys icekkfsm |

SEQ ID NO: 137 Human CLEC7A Transcript Variant 6 cDNA Sequence
(NM_197954.2; CDS: 188-421)

| | |
|---|---|
| 1 | agcatagttt catttcctgc tcttgaatat ctggttgaac tacttaagct taatttgtta |
| 61 | aactccggta agtacctagc ccacatgatt tgactcagag attctctttt gtccacagac |
| 121 | agtcatctca ggagcagaaa gaaaagagct cccaaatgct atatctattc aggggctctc |
| 181 | aagaacaatg gaatatcatc ctgatttaga aaatttggat gaagatggat atactcaatt |
| 241 | acacttcgac tctcaaagca ataccaggat agctgttgtt tcagagaaag gatcgtgtgc |
| 301 | tgcatctcct ccttggcgcc tcattgctgt aattttggga atcctatgct tggtaatact |
| 361 | ggtgatagct gtggtcctgg gtaccatggc tggtttcaaa gctgtggaat tcaaaggata |
| 421 | aattaatgaa gaaaacaagc ggagctgaag aagaaagtac aatatggtgc tgtcttccta |
| 481 | atgaaataaa ttcactaaat ggacattaaa aaaaaaaa |

SEQ ID NO: 138 Human CLEC7A Isoform F Amino Acid Sequence (NP_922945.1)

| | |
|---|---|
| 1 | meyhpdlenl dedgytqlhf dsqsntriav vsekgscaas ppwrliavil gilclvilvi |
| 61 | avvlgtmagf kavefkg |

SEQ ID NO: 139 Mouse CLEC7A Transcript Variant 2 cDNA Sequence
(NM_001309637.1; CDS: 95-694)

| | |
|---|---|
| 1 | tgtttcaggg tttgggttag tgagcctcat cctggcagtt attttatagt aaagaacatt |
| 61 | caagtgctct gcctacctag ggccctgtga agcaatgaaa tatcactctc atatagagaa |
| 121 | tctggatgaa gatggatata ctcaattaga cttcagcact caagacatcc ataaaaggcc |
| 181 | caggggatca gagaaaggaa gccaggctcc atcttcacct tggaggccca ttgcagtggg |
| 241 | tttaggaatc ctgtgctttg tggtagtagt ggttgctgca gtgctgggtg ccctaggagg |
| 301 | tttttctcag ccttgccttc ctaattggat catgcatggg aagagctgtt acctatttag |
| 361 | cttctcagga aattcctggt atggaagtaa gagacactgc tcccagctag gtgctcatct |
| 421 | actgaagata gacaactcaa aagaatttga gttcattgaa agccaaacat cgtctcaccg |
| 481 | tattaatgca ttttggatag gcctttcccg caatcagagt gaagggccat ggttctggga |
| 541 | ggatggatca gcattcttcc ccaactcgtt tcaagtcaga aatacagctc cccaggaaag |
| 601 | cttactgcac aattgtgtat ggattcatgg atcagaggtc tacaaccaaa tctgcaatac |
| 661 | ttattcatac agtatctgtg agaaggaact gtaaatgtat gtgagaatat aaagatggtg |
| 721 | tgtgtgtgtg tgtgtgtgtg tgtgtacatg cacacacacc accaccacca ccactaccaa |
| 781 | caacagaaca gaacagaaca gaacagaaca gattaatatt aaaaaacaga aaaaatgctg |
| 841 | ggatgctaag agactttaac ctcatttgag aacttggatg aagaagctga gacttttgta |
| 901 | cttgtcatct tcacaaagat ggtggcacta tcttccagtt aggaagtcac tagacatgga |
| 961 | gtgagggcag ctcaacaata cagagaatat gtgaacctga ggtaccctga ctcaaatttc |
| 1021 | acaaccacaa tgaaacccct acactatcag gaaacactgt agaggagtga gactgaagac |
| 1081 | tttaaaagcc agagaatcag cctacttact gtggtgtttt ctagacagga cagggaaagt |
| 1141 | atatctagga aataaaaaca atacaattca gcaaacaaaa tctgcataat gacaacctca |
| 1201 | gttggtatgg tatgttatgg tatggtatgg gtgtagaagt ttcacaaggc cctatgaaga |
| 1261 | actacagaca gttaaatagg gggaaagctt tttctaggat caagcctact gaaccccaag |
| 1321 | aagtcagcac tgaacatatg tacagatcag tatcattaaa tgaactagta agacatatac |
| 1381 | atatatgtta atcaaatatt ggtaccagag tacacactgt gtttgcatga ttttctcagt |
| 1441 | atctacagta caccagacac agggagaagg caaaatgaac ttctaaattg agaagtgaaa |
| 1501 | aaaatgaggg aagagaatct tcaccacaaa tagggattct attttcaccc acatgatcat |
| 1561 | tattaagatg gccatcaccc aaacgtcgtg acccaagcta cttcctcaac tagataactc |
| 1621 | aaagagtctg cccacctttt ctgatagcaa atctggtatc tagatttcac tgtttcctta |
| 1681 | tgctgtctgg ccagcagtat gacaaaggtg ctgccctttc aggaagcagt ctccttaaat |
| 1741 | gctgtagttg gaaagataaa tcatatctga tagtgaatat ttaaaaagcg cccagtcagg |
| 1801 | ataagtgttt tggaacacag aacatatttc atctttttat gatacactat cttgcaatta |
| 1861 | acaaccaatt cttaagtcat ttctttacaa acatatgact ggaatatgac tgtttcctag |
| 1921 | tgtgatctgt cttgttaact tctaagattg tccattaata ccacccttat ttccagtgtg |
| 1981 | gacttccaaa ttgctgggga tctgtttata gctttctcag actaatcaat atgtgggcag |
| 2041 | aaattgtgct gagtccactg aattgttctc ttgaaaatga ttgggtttat gtcactttca |
| 2101 | tctcaattga aaaactgctt attaaagtat ctttggcctc tgaa |

SEQ ID NO: 140 Mouse CLEC7A Isoform 2 Amino Acid Sequence
(NP_001296566.1)

| | |
|---|---|
| 1 | mkyhshienl dedgytqldf stqdihkrpr gsekgsqaps spwrpiavgl gilcfvvvvv |
| 61 | aavlgalggf sqpclpnwim hgkscylfsf sgnswygskr hcsqlgahll kidnskefef |
| 121 | iesqtsshri nafwiglsrn qsegpwfwed gsaffpnsfq vrntapqesl lhncvwihgs |
| 181 | evynqicnts sysicekel |

SEQ ID NO: 141 Mouse CLEC7A Transcript Variant 1 cDNA Sequence
(NM_020008.3; CDS: 95-829)

| | |
|---|---|
| 1 | tgtttcaggg tttgggttag tgagcctcat cctggcagtt attttatagt aaagaacatt |
| 61 | caagtgctct gcctacctag ggccctgtga agcaatgaaa tatcactctc atatagagaa |
| 121 | tctggatgaa gatggatata ctcaattaga cttcagcact caagacatcc ataaaaggcc |
| 181 | caggggatca gagaaaggaa gccaggctcc atcttcacct tggaggccca ttgcagtggg |
| 241 | tttaggaatc ctgtgctttg tggtagtagt ggttgctgca gtgctgggtg ccctagcatt |
| 301 | ttggcgacac aattcaggga gaaatccaga ggagaaagac aacttcctat caagaaataa |
| 361 | agagaaccac aagcccacag aatcatcttt agatgagaag gtggctccct ccaaggcatc |
| 421 | ccaaactaca ggaggttttt ctcagccttg ccttcctaat tggatcatgc atgggaagag |
| 481 | ctgttaccta tttagcttct caggaaattc ctggtatgga agtaagagac actgctccca |
| 541 | gctaggtgct catctactga agatagacaa ctcaaaagaa tttgagttca ttgaaagcca |
| 601 | aacatcgtct caccgtatta atgcattttg gataggcctt tcccgcaatc agagtgaagg |
| 661 | gccatggttc tgggaggatg gatcagcatt cttccccaac tcgtttcaag tcagaaatac |
| 721 | agctccccag gaaagcttac tgcacaattg tgtatggatt catggatcag aggtctacaa |
| 781 | ccaaatctgc aatacttatt catacagtat ctgtgagaag gaactgtaaa tgtatgtgag |
| 841 | aatataaaga tggtgtgtgt gtgtgtgtgt gtgtgtgtgt acatgcacac acaccaccac |
| 901 | caccaccact accaacaaca gaacagaaca gaacagaaca gaacagatta atattaaaaa |
| 961 | acagaaaaaa tgctgggatg ctaagagact ttaacctcat ttgagaactt ggatgaagaa |
| 1021 | gctgagactt ttgtacttgt catcttcaca aagatggtgg cactatcttc cagttaggaa |
| 1081 | gtcactagac atggagtgag ggcagctcaa caatacagag aatatgtgaa cctgaggtac |
| 1141 | cctgactcaa atttcacaac cacaatgaaa cccctacact atcaggaaac aatgtagagg |
| 1201 | agtgagactg aagactttaa aagccagaga atcagcctac ttactgtggt gttttctaga |
| 1261 | caggacaggg aaagtatatc taggaaataa aaacaataca attcagcaaa caaaatctgc |
| 1321 | ataatgacaa cctcagttgg tatggtatgt tatggtatgg tatgggtgta gaagtttcac |
| 1381 | aaggccctat gaagaactac agacagttaa atagggggaa agctttttct aggatcaagc |
| 1441 | ctactgaacc ccaagaagtc agcactgaac atatgtacag atcagtatca ttaaatgaac |
| 1501 | tagtaagaca tatacatata tgttaatcaa atattggtac cagagtacac actgtgtttg |
| 1561 | catgattttc tcagtatcta cagtacacca gacacaggga gaaggcaaaa tgaacttcta |
| 1621 | aattgagaag tgaaaaaaat gagggaagag aatcttcacc acaaataggg attctatttt |
| 1681 | cacccacatg atcattatta agatggccat cacccaaacg tcgtgaccca agctacttcc |
| 1741 | tcaactagat aactcaaaga gtctgcccac cttttctgat agcaaatctg gtatctagat |
| 1801 | ttcactgttt ccttatgctg tctggccaga agtatgacaa aggtgctgcc ctttcaggaa |
| 1861 | gcagtctcct taaatgctgt agttggaaag ataaatcata tctgatagtg aatatttaaa |
| 1921 | aagcgcccag tcaggataag tgttttggaa cacagaacat atttcatctt tttatgatac |
| 1981 | actatcttgc aattaacaac caattcttaa gtcatttctt tacaaacata tgactggaat |
| 2041 | atgactgttt cctagtgtga tctgtcttgt taacttctaa gattgtccat taataccacc |
| 2101 | cttatttcca gtgtggactt ccaaattgct ggggatctgt ttatagcttt ctcagactaa |
| 2161 | tcaatatgtg ggcagaaatt gtgctgagtc cactgaattg ttctcttgaa aatgattggg |
| 2221 | tttatgtcac tttcatctca attgaaaaac tgcttattaa agtatctttg gcctctgaa |

SEQ ID NO: 142 Mouse CLEC7A Isoform 1 Amino Acid Sequence (NP_064392.2)

| | |
|---|---|
| 1 | mkyhshienl dedgytqldf stqdihkrpr gsekgsqaps spwrpiavgl gilcfvvvvv |
| 61 | aavlgalafw rhnsgrnpee kdnflsrnke nhkptessld ekvapskasq ttggfsqpcl |
| 121 | pnwimhgksc ylfsfsgnsw ygskrhcsql gahllkidns kefefiesqt sshrinafwi |
| 181 | glsrnqsegp wfwedgsaff pnsfqvrnta pqesllhncv wihgsevynq icntssysic |
| 241 | ekei |

SEQ ID NO: 143 Human TBXAS1 Transcript Variant 1 cDNA Sequence
(NM_001061.4; CDS: 236-1840)

| | |
|---|---|
| 1 | aaggaataaa gttgctgatt cattccttta cactgaaacc ctttgttgtg ccctcctctt |
| 61 | ccttcctctt tatagggaga cactctgaga aagagcacat tgtgggggcc cactccatgt |
| 121 | gatgtttgct tggttgcctg ttcccttttc tacctgcaga gcacggttcc cataagggcg |
| 181 | gcgagatcag cctcctgtct catctggaag accaccactc tggggtctca gaggaatgat |
| 241 | ggaagccttg gggtttctaa aattggaagt gaatggcccc atggtgacgg tggccctgtc |
| 301 | agtggctctc ttggccctcc tgaaatggta ctccacatca gcattctcaa gactggagaa |
| 361 | gttaggcctc agacatccca agccttctcc tttcattgga aacttgacat ttttccgcca |
| 421 | gggtttttgg gaaagccaaa tggagctcag aaagctgtat ggacctctgt gtgggtacta |
| 481 | tcttggtcgt cggatgttta ttgttatttc tgagccagac atgatcaagc aggtgttggt |
| 541 | tgagaacttc agtaacttta ccaacagaat ggcgtcgggt ttggagttca agtcggtagc |
| 601 | cgacagcgtt ctgtttttac gtgacacaag atgggaagag gtcagaggtg ccctgatgtc |
| 661 | tgctttcagt cctgaaaagc tgaacgagat ggttcccctc atcagccaag cctgcgacct |
| 721 | tctcctggct catttaaaac gctatgcgga atctggggac gcatttgaca tccagaggtg |
| 781 | ctactgcaat tacaccacag atgtggttgc cagcgtcgcc tttggcaccc cggtggactc |
| 841 | ctggcaggcc cctgaggatc cctttgtgaa acactgcaag cgtttcttcg aattctgcat |
| 901 | ccccagacct atcctggttt tactcttatc atttccatcc ataatggtcc cactggcccg |
| 961 | gattttgccc aataagaacc gagacgaact gaatggcttt tttaacaaac tcattaggaa |
| 1021 | tgtgattgcc ttgcgggacc agcaagctgc cccagagagg cggagagact tcctccaaat |
| 1081 | ggtcctggat gcccgacatt ctgcaagtcc catgggcgtg caagactttg acatcgtcag |
| 1141 | agacgttttc tcctctactg ggtgcaagcc gaacccttcc cggcaacacc agcccagccc |
| 1201 | tatggccagg cctttgactg tggatgagat tgtgggccag gccttcatct tcctcatcgc |
| 1261 | tggctatgaa atcatcacca acacactttc ttttgccacc tacctactgg ccaccaaccc |
| 1321 | tgactgccaa gagaagcttc tgagagaggt agacgttttt aaggagaaac acatggcccc |
| 1381 | tgagttctgc agcctcgagg aaggcctgcc ctatctggac atggtgattg cagagacgct |
| 1441 | gaggatgtac ccgccagctt tcagattcac acgggaggca gctcaggact gcgaggtgct |
| 1501 | ggggcagcgc atccccgccg gcgctgtgct agagatggcc gtgggtgccc tgcaccatga |
| 1561 | ccctgagcac tggccaagcc cggagacctt caaccctgaa aggttcacgg ctgaggcccg |
| 1621 | gcagcagcac cggcccttca cgtacctgcc cttcggggcc ggcccacgga gctgcctcgg |
| 1681 | ggtgcgtcta gggctgcttg aggtcaagtt gacactgctc cacgtgctgc accagttccg |
| 1741 | gttccaagcc tgccctgaga cccaggtacc gctgcagcta gaatccaaat ctgccctagg |
| 1801 | tccaaaaaat ggtgtctata tcaagatcgt atcccgctga cacagaaggc tgccgggtgg |
| 1861 | ggggagggca cccccaaatt caaagaaaac cctaagtgtg gatgttcaga attttggaaa |
| 1921 | aatgtcactg aagtgattga aagagtgcct ggcatgcaag gataagaggt tctttacata |
| 1981 | acatttccta aatgcttaat aaacgtttgt tgcacttggt tttgacattg ccaatggggt |
| 2041 | ttgaaccagt gctctctcta aatgaaaaaa aaaaaaaaaa aa |

SEQ ID NO: 144 Human TBXAS1 Isoform 1 Amino Acid Sequence (NP_001052.2
and NP_001124438.1)

| | |
|---|---|
| 1 | mmealgflkl evngpmvtva lsvallallk wystsafsrl eklglrhpkp spfignltff |
| 61 | rqgfwesqme lrklygplcg yylgrrmfiv isepdmikqv lvenfsnftn rmasglefks |
| 121 | vadsvlflrd krweevrgal msafspekln emvplisqac dlllahlkrv aesgdafdiq |
| 181 | rcycnyttdv vasvafgtpv dswqapedpf vkhckrffef ciprpilvll lsfpsimvpl |
| 241 | arilpnknrd elngffnkli rnvialrdqq aaeerrrdfl qmvldarhsa spmgvqdfdi |
| 301 | vrdvfsstgc kpnpsrqhqp spmarpltvd eivgqafifl iagyeiitnt lsfatyllat |
| 361 | npdcqekllr evdvfkekhm apefcsleeg lpyldmviae tlrmyppafr ftreaaqdce |
| 421 | vlgqripaga vlemavgalh hdpehwpspe tfnperftae arqqhrpfty lpfgagprsc |
| 481 | lgvrlgllev kltllhvlhk flfqacpetq vplqlesksa lgpknqvyik ivsr |

SEQ ID NO: 145 Human TBXAS1 Transcript Variant 2 cDNA Sequence
(NM_030984.3; CDS: 236-1618)

| | |
|---|---|
| 1 | aaggaataaa gttgctgatt cattccttta cactgaaacc ctttgttgtg ccctcctctt |
| 61 | ccttcctctt tatagggaga cactctgaga aagagcacat tgtgggggcc cactccatgt |
| 121 | gatgtttgct tggttgcctg ttcccttttc tacctgcaga gcacggttcc cataagggcg |
| 181 | gcgagatcag cctcctgtct catctggaag accaccactc tggggtctca gaggaatgat |
| 241 | ggaaagcctt gggtttctaa aattggaagt gaatggcccc atggtgacgg tggccctgtc |
| 301 | agtggctctc ttggccctcc tgaaatggta ctccacatca gcattctcaa gactggagaa |
| 361 | gttaggcctc agacatccca agccttctcc tttcattgga aacttgacat ttttccgcca |
| 421 | gggtttttgg gaaagccaaa tggagctcag aaagctgtat ggacctctgt gtgggtacta |
| 481 | tcttggtcgt cggatgttta ttgttatttc tgagccagac atgatcaagc aggtgttggt |
| 541 | tgagaccttc agtaacttta ccaacagaat ggcgtcgggt ttggagttca agtcggtagc |
| 601 | cgacagcgtt ctgtttttac gtgacaaaag atgggaagag gtcagaggtg ccctgatgtc |
| 661 | tgctttcagt cctgaaaagc tgaacgagat ggttcccctc atcagccaag cctgcgacct |
| 721 | tctcctggct catttaaaac gctatgcgga atctggggac gcatttgaca tccagaggtg |
| 781 | ctactgcaat tacaccacag atgtggttgc cagcgtcgcc tttggcaccc cggtggactc |
| 841 | ctggcaggcc cctgaggatc cctttgtgaa acactgcaag cgtttcttcg aattctgcat |
| 901 | ccccagacct atcctggttt tactcttatc atttccatcc ataatggtcc cactggcccg |
| 961 | gattttgccc aataagaacc gagacgaact gaatggcttt tttaacaaac tcattaggaa |
| 1021 | tgtgattgcc ttgcgggacc agcaagctgc cgaagagagg cggagagact tcctccaaat |
| 1081 | ggtcctggat gcccgacatt ctgcaagtcc catgggcgtg caagactttg acatcgtcag |
| 1141 | agacgttttc tcctctactg ggtgcaagcc gaacccttcc cggcaacacc agcccagccc |
| 1201 | tatggccagg cctttgactg tggatgagat tgtgggccag gccttcatct tcctcatcgc |
| 1261 | tggctatgaa atcatcacca acacactttc ttttgccacc tacctactgg ccaccaaccc |
| 1321 | tgactgccaa gagaagcttc tgagagaggt agacgttttt aaggagaaac acatggcccc |
| 1381 | tgagttctgc agcctcgagg aaggcctgcc ctatctggac atggtgattg cagagacgct |
| 1441 | gaggatgtac ccgccagctt tcagattcac acgggaggca gctcaggact gcgaggtgct |
| 1501 | ggggcagcgc atccccgcag gcgctgtgct agagatggcc gtgggtgccc tgcaccatga |
| 1561 | ccctgagcac tggccaagcc cggagacctt caaccctgaa aggtaccgct gcagctagaa |
| 1621 | tccaaatctg ccctaggtcc aaaaaatggt gtctatatca agatcgtatc ccgctgacac |
| 1681 | agaaggctgc cgggtggggg gagggcaccc ccaaattcaa agaaaaccct aagtgtggat |
| 1741 | gttcagaatt ttggaaaaat gtcactgaag tgattgaaag agtgcctggc atgcaaggat |
| 1801 | aagaggttct ttacataaca tttcctaaat gcttaataaa cgtttgttgc acttggtttt |
| 1861 | gacattgcca atggggtttg aaccagtgct ctctctaaat gaaaaaaaaa aaaaaaaaa |

SEQ ID NO: 146 Human TRXAS1 Isoform 2 Amino Acid Sequence (NP_112246.2)

| | |
|---|---|
| 1 | mmealgflkl evngpmvtva lsvallallk wystsafsrl eklglrhpkp spfignltff |
| 61 | rqgfwesqme irklygplcg yylgrrmfiv isepdmikqv lvenfsnftn rmasglefks |
| 121 | vadsvlflrd krweevrgal msafspekln emvplisqac dlllahlkry aesgdafdiq |
| 181 | rcycnyttdv vasvafgtpv dswqapedpf vkhckrffef ciprpilvll lsfpsimvpl |
| 241 | arilpnknrd elngffnkli rnvialrdqq aaeerrrdfl qmvldarhsa spmgvqdfdi |
| 301 | vrdvfsstgc kpnpsrqhqp spmarpltvd eivgqafifl iagyeiitnt lsfatyllat |
| 361 | npdcqekllr evdvfkekhm apefcsleeg lpyldmviae tlrmyppafr ftreaaqdce |
| 421 | vigqripaga vlemavgalh hdpehwpspe tfnperyrcs |

SEQ ID NO: 147 Human TBXAS1 Transcript Variant 3 cDNA Sequence
(NM_001130966.2; CDS: 539-2143)

| | |
|---|---|
| 1 | gagggccggc ctggacccgg cgggcgcacg gctccgagcc cagcgcagcc gagccggtct |
| 61 | gcagaggggc ccccagaact ttgtgtgtgt gtgtgcacgc gcgcgcgtgt gtgcccaggt |
| 121 | gcgagggttc gcgcgtgtgc tggcggggag ggaaccgacc cgaaagagag ccccacgctg |
| 181 | gcaaagtggc tcgcccatct cacagccggt tggcgctcgc ggaggctcac agaacatttc |
| 241 | ctgcctgttg ctcacactct gttgtccaca gcatacccgc accctagatg gctgactctt |
| 301 | gtcttctgtc tctttatttt ccatgtgtga gcctgtgcct gtggtttatc tctggaggat |
| 361 | gtgcctgagg gaggagacat atactgcctg gactgcctgg ctgatgtgag ctagtttgtc |
| 421 | tggttgagtt ggatgtttaa atagaaggca gaacaacaac agagcacggt tcccataagg |
| 481 | gcggcgagat cagcctcctg tctcatctgg aagaccacca ctctggggtc tcagaggaat |
| 541 | gatggaagcc ttggggtttc taaaattgga agtgaatggc cccatggtga cggtggccct |
| 601 | gtcagtggct ctcttggccc tcctgaaatg gtactccaca tcagcattct caagactgga |
| 661 | gaagttaggc ctcagacatc ccaagccttc tcctttcatt ggaaacttga catttttccg |
| 721 | ccagggtttt tgggaaagcc aaatggagct cagaaagctg tatggacctc tgtgtgggta |
| 781 | ctatcttggt cgtcggatgt ttattgttat ttctgagcca gacatgatca agcaggtgtt |
| 841 | ggttgagaac ttcagtaact ttaccaacag aatggcgtcg ggtttggagt tcaagtcggt |
| 901 | agccgacagc gttctgtttt tacgtgacaa aagatgggaa gaggtcagag gtgccctgat |
| 961 | gtctgctttc agtcctgaaa agctgaacga gatggttccc ctcatcagcc aagcctgcga |
| 1021 | ccttctcctg gctcatttaa aacgctatgc ggaatctggg gacgcatttg acatccagag |
| 1081 | gtgctactgc aattacacca cagatgtggt tgccagcgtc gcctttggca ccccggtgga |
| 1141 | ctcctggcag gcccctgagg atccctttgt gaaacactgc aagcgtttct tcgaattctg |
| 1201 | catccccaga cctatcctgg ttttactctt atcatttcca tccataatgg tcccactggc |
| 1261 | ccggattttg cccaataaga accgagacga actgaatggc ttttttaaca aactcattag |
| 1321 | gaatgtgatt gccttgcggg accagcaagc tgccgaagag aggcggagag acttcctcca |
| 1381 | aatggtcctg gatgcccgac attctgcaag tcccatgggc gtgcaagact ttgacatcgt |
| 1441 | cagagacgtt ttctcctcta ctgggtgcaa gccgaaccct tcccggcaac accagcccag |
| 1501 | ccctatggcc aggcctttga ctgtggatga gattgtgggc caggccttca tcttcctcat |
| 1561 | cgctggctat gaaatcatca ccaacacact ttcttttgcc acctacctac tggccaccaa |
| 1621 | ccctgactgc caagagaagc ttctgagaga ggtagacgtt tttaaggaga aacacatggc |
| 1681 | ccctgagttc tgcagcctcg aggaaggcct gccctatctg gacatggtga ttgcagagac |
| 1741 | gctgaggatg tacccgccag ctttcagatt cacacgggag gcagctcagg actgcgaggt |
| 1801 | gctggggcag cgcatccccg caggcgctgt gctagagatg gccgtgggtg ccctgcacca |
| 1861 | tgaccctgag cactggccaa gcccggagac cttcaaccct gaaaggttca cggctgaggc |
| 1921 | ccggcagcag caccggccct tcacgtacct gcccttcggg gccggcccac ggagctgcct |
| 1981 | cggggtgcgt ctagggctgc ttgaggtcaa gttgacactg ctccacgtgc tgcacaagtt |
| 2041 | ccggttccaa gcctgccctg agacccaggt accgctgcag ctagaatcca aatctgccct |
| 2101 | aggtccaaaa aatggtgtct atatcaagat cgtatcccgc tgacacagaa ggctgccggg |
| 2161 | tggggggagg gcacccccaa attcaaagaa aaccctaagt gtggatgttc agaattttgg |
| 2221 | aaaaatgtca ctgaagtgat tgaaagagtg cctggcatgc aaggataaga ggttctttac |
| 2281 | ataacatttc ctaaatgctt aataaacgtt tgttgcactt ggttttgaca ttgccaatgg |
| 2341 | ggtttgaacc agtgctctct ctaaatgaaa aaaaaaaaaa aaaaa |

SEQ ID NO: 148 Human TBXAS1 Transcript Variant 4 cDNA Sequence
(NM_001166253.1; CDS: 236-1978)

| | |
|---|---|
| 1 | aaggaataaa gttgctgatt cattccttta cactgaaacc ctttgttgtg ccctcctctt |
| 61 | ccttcctctt tatagggaga cactctgaga aagagcacat tgtgggggcc cactccatgt |
| 121 | gatgtttgct tggttgcctg ttcccttttc tacctgcaga gcacggttcc cataagggcg |
| 181 | gcgagatcag cctcctgtct catctggaag accaccactc tggggtctca gaggaatgat |
| 241 | ggaagccttg gggtttctaa aattggaagt gaatggcccc atggtgacgg tggccctgtc |
| 301 | agtggctctc ttggccctcc tgaaatggta ctccacatca gcattctcaa gactggagaa |
| 361 | gttaggcctc agacatccca agccttctcc tttcattgga aacttgacat ttttccgcca |
| 421 | gggtttttgg gaaagccaaa tggagctcag aaagctgtat ggacctctgt gtgggtacta |
| 481 | tcttggtcgt cggatgttta ttgttatttc tgagccagac atgatcaagc aggtgttggt |
| 541 | tgagaacttc agtaacttta ccaacagaat ggcgtcgggt ttggagttca agtcggtagc |
| 601 | cgacagcgtt ctgtttttac gtgacaaaag atgggaagag gtcagaggtg ccctgatgtc |
| 661 | tgctttcagt cctgaaaagc tgaacgagct tggcctttta atcatgcaag agagaataaa |
| 721 | aggtcacatg ggtggccagc aggctccaca aagaattcca cccacccgtt tgtcgaagcc |
| 781 | gagtggtatc tatgtgaatc tccattatgc cactctacct ttctgtatgg ttcccctcat |
| 841 | cagccaagcc tgcgaccttc tcctggctca tttaaaacgc tatgcggaat ctggggacgc |
| 901 | atttgacatc cagaggtgct actgcaatta caccacagat gtggttgcca gcgtcgcctt |
| 961 | tggcaccccg gtggactcct ggcaggcccc tgaggatccc tttgtgaaac actgcaagcg |
| 1021 | tttcttcgaa ttctgcatcc ccagacctat cctggtttta ctcttatcat ttccatccat |
| 1081 | aatggtccca ctggcccgga ttttgcccaa taagaaccga gacgaactga atggcttttt |
| 1141 | taacaaactc attaggaatg tgattgcctt gcgggaccag caagctgccg aagagaggcg |
| 1201 | gagagacttc ctccaaatgg tcctggatgc ccgacattct gcaagtccca tgggcgtgca |
| 1261 | agactttgac atcgtcagag acgttttctc ctctactggg tgcaagccga acccttcccg |
| 1321 | gcaacaccag cccagcccta tggccaggcc tttgactgtg gatgagattg tgggccaggc |
| 1381 | cttcatcttc ctcatcgctg gctatgaaat catcaccaac acactttctt ttgccaccta |
| 1441 | cctactggcc accaaccctg actgccaaga gaagcttctg agagaggtag acgtttttaa |
| 1501 | ggagaaacac atggcccctg agttctgcag cctcgaggaa ggcctgccct atctggacat |
| 1561 | ggtgattgca gagacgctga ggatgtaccc gccagctttc agattcacac gggaggcagc |
| 1621 | tcaggactgc gaggtgctgg ggcagcgcat ccccgcaggc gctgtgctag agatggccgt |
| 1681 | gggtgccctg caccatgacc ctgagcactg gccaagcccg gagaccttca accctgaaag |
| 1741 | gttcacggct gaggcccggc agcagcaccg gcccttcacg tacctgccct tcggggccgg |
| 1801 | cccacggagc tgcctcgggg tgcgtctagg gctgcttgag gtcaagttga cactgctcca |
| 1861 | cgtgctgcac aagttccggt tccaagcctg ccctgagacc caggtaccgc tgcagctaga |
| 1921 | atccaaatct gccctaggtc caaaaaatgg tgtctatatc aagatcgtat cccgctgaca |
| 1981 | cagaaggctg ccgggtgggg ggagggcacc cccaaattca aagaaaaccc taagtgtgga |
| 2041 | tgttcagaat tttggaaaaa tgtcactgaa gtgattgaaa gagtgcctgg catgcaagga |
| 2101 | taagaggttc tttacataac atttcctaaa tgcttaataa acgtttgttg cacttggttt |
| 2161 | tgacattgcc aatggggttt gaaccagtgc tctctctaaa tgaaaaaaaa aaaaaaaaaa |

SEQ ID NO: 149 Human TBXAS1 Isoform 3 Amino Acid Sequence
(NM_001139725.1)

| | |
|---|---|
| 1 | mmealgflki evngpmvtva lsvallallk wystsafsrl eklgarhpkp spfignltff |
| 61 | rqgfwesqme lrklygplcg yylgrrmfiv isepdmikqv lvenfsnftn rmasglefks |
| 121 | vadsvlflrd krweevrgal msafspekln elgllimqer ikghmqgqqa pqripptrls |
| 181 | kpsgiyvnlh yatlpfcmvp lisqacdlll ahlkryaesg dafdiqrcyc nyttdvvasv |
| 241 | afgtpvdswq apedpfvkhc krffefcipr pilvlllsfp simvplaril pnknrdelng |
| 301 | ffnklirnvi alrdqqaaee rrrdflqmvl darhsaspmg vqdfdivrdv fsstgckpnp |
| 361 | srqhqpspma rpltvdeivg qafifliagy eiitntlsfa tyllatnpdc qekllrevdv |
| 421 | fkekhmapef csleeglpyl dmviaetlrm yppafrftre aaqdcevlgq ripagavlem |
| 481 | avgalhhdpe hwpspetfnp erftaearqq hrpftylpfg agprsclgvr lgllevkltl |
| 541 | lhvlhkfrfq acpetqvplq lesksalgpk ngvyikivsr |

SEQ ID NO: 150 Human TBXAS1 Transcript Variant 5 cDNA Sequence
(NM_001166254.1; CDS: 490-1890)

| | |
|---|---|
| 1 | gagggccggc ctggacccgg cgggcgcacg gctccgagcc cagcgcagcc gagccggtct |
| 61 | gcagaggggc ccccagaact ttgtgtgtgt gtgtgcacgc gcgcgcgtgt gtgcccaggt |
| 121 | gcgagggttc gcgcgtgtgc tggcggggag ggaaccgacc cgaaagagag ccccacgctg |
| 181 | gcaaagtggc tcgcccatct cacagccggt tggcgctcgc ggagctcttt attttccatg |
| 241 | tgtgagcctg tgcctgtggt ttatctctgg aggatgtgcc tgagggagga gacatatact |
| 301 | gcctggactg cctggctgat gtgagctagt ttgtctggtt gagttggatg tttaaataga |
| 361 | aggcagaaca acaacaggta ctccacatca gcattctcaa gactggagaa gttaggcctc |
| 421 | agacatccca agccttctcc tttcattgga aacttgacat ttttccgcca gggtttttgg |
| 481 | gaaagccaaa tggagctcag aaagctgtat ggacctctgt gtgggtacta tcttggtcgt |
| 541 | cggatgttta ttgttatttc tgagccagac atgatcaagc aggtgttggt tgagaacttc |
| 601 | agtaacttta ccaacagaat ggcgtcgggt ttggagttca agtcggtagc cgacagcgtt |
| 661 | ctgtttttac gtgacaaaag atgggaagag gtcagaggtg ccctgatgtc tgctttcagt |
| 721 | cctgaaaagc tgaacgagat ggttcccctc atcagccaag cctgcgacct tctcctggct |
| 781 | catttaaaac gctatgcgga atctggggac gcatttgaca tccagaggtg ctactgcaat |
| 841 | tacaccacag atgtggttgc cagcgtcgcc tttggcaccc cggtggactc ctggcaggcc |
| 901 | cctgaggatc cctttgtgaa acactgcaag cgtttcttcg aattctgcat ccccagacct |
| 961 | atcctggttt tactcttatc atttccatcc ataatggtcc cactggcccg gattttgccc |
| 1021 | aataagaacc gagacgaact gaatggcttt tttaacaaac tcattaggaa tgtgattgcc |
| 1081 | ttgcgggacc agcaagctgc cgaagagagg cggagagact tcctccaaat ggtcctggat |
| 7741 | gcccgacatt ctgcaagtcc catgggcgtg caagactttg acatcgtcag agacgttttc |
| 1201 | tcctctactg ggtgcaagcc gaacccttcc cggcaacacc agcccagccc tatggccagg |
| 1261 | cctttgactg tggatgagat tgtgggccag gccttcatct tcctcatcgc tggctatgaa |
| 1321 | atcatcacca acacactttc ttttgccacc tacctactgg ccaccaaccc tgactgccaa |
| 1381 | gagaagcttc tgagagaggt agacgttttt aaggagaaac acatggcccc tgagttctgc |
| 1441 | agcctcgagg aaggcctgcc ctatctggac atggtgattg cagagacgct gaggatgtac |
| 1501 | ccgccagctt tcagattcac acgggaggca gctcaggact gcgaggtgct ggggcagcgc |
| 1561 | atccccgcag gcgctgtgct agagatggcc gtgggtgccc tgcaccatga ccctgagcac |
| 1621 | tggccaagcc cggagacctt caaccctgaa aggttcacgg ctgaggcccg gcagcagcac |
| 1681 | cggcccttca cgtacctgcc cttcggggcc ggcccacgga gctgcctcgg ggtgcgtcta |
| 1741 | gggctgcttg aggtcaagtt gacactgctc cacgtgctgc acaagttccg gttccaagcc |
| 1801 | tgccctgaga cccaggtacc gctgcagcta gaatccaaat ctgccctagg tccaaaaaat |
| 1861 | ggtgtctata tcaagatcgt atcccgctga cacagaaggc tgccgggtgg ggggagggca |
| 1921 | cccccaaatt caaagaaaac cctaagtgtg gatgttcaga attttggaaa aatgtcactg |
| 1981 | aagtgattga aagagtgcct ggcatgcaag gataagaggt tctttacata acatttccta |
| 2041 | aatgcttaat aaacgtttgt tgcacttggt tttgacattg ccaatggggt ttgaaccagt |
| 2101 | gctctctcta aatgaaaaaa aaaaaaaaaa aa |

SEQ ID NO: 151 Human TBXAS1 Isoform 4 Amino Acid Sequence
(NM_001159726.1)

| | |
|---|---|
| 1 | melrklygpl cgyylgrrmf ivisepdmik qvlvenfsnf tnrmasglef ksvadsvlfl |
| 61 | rdkrweevrg almsafspek lnemvplisq acdlllahlk ryaesgdafd iqrcycnytt |
| 121 | dvvasvafgt pvdswqaped pfvkhckrff efciprpilv lllsfpsimv plarilpnkn |
| 181 | rdelngffnk lirnvialrd qqaaeerrrd flqmvldarh saspmqvqdf divrdvfsst |
| 241 | gckpnpsrqh qpspmarplt vdeivgqafi fliagyeiit ntlsfatyll atnpdcqekl |
| 301 | lrevdvfkek hmapefcsle eglpyldmvi aetlrmyppa frftreaaqd cevlgqripa |
| 361 | gavlemavga lhhdpehwps petfnperft aearqqhrpf tylpfgagpr sclgvrlgll |
| 421 | evkltllhvl hkfrfqacpe tqvplqlesk salgpkngvy ikivsr |

SEQ ID NO: 152 Human TBXAS1 Transcript Variant 6 cDNA Sequence
(NM_001314028.1; CDS: 325-1869)

| | |
|---|---|
| 1 | aaggaataaa gttgctgatt cattccttta cactgaaacc ctttgttgtg ccctcctctt |
| 61 | ccttcctctt tatagggaga cactctgaga aagagcacat tgtgggggcc cactccatgt |
| 121 | gatgtttgct tggttgcctg ttcccttttc tacctgcaga gcacggttcc cataagggcg |
| 181 | gcgagatcag cctcctgtct catctggaag accaccactc tggggtctca gaggaatgat |
| 241 | ggaagccttg gggtttctaa aattggaagt gaatggcccc atggtgacgg tggccctgtc |
| 301 | agtggctctc ttggccctcc tgaaatggta ctccacatca gcattctcaa gactggagaa |
| 361 | gttaggcctc agacatccca agccttctcc tttcattgga aacttgacat ttttccgcca |
| 421 | gggtttttgg gaaagccaaa tggagctcag aaagctgtat ggacctctgt gtgggtaaga |
| 481 | aggaaactca acgtttctat tatgtactat cttggtcgtc ggatgtttat tgttatttct |
| 541 | gagccagaca tgatcaagca ggtgttggtt gagaacttca gtaactttac caacagaatg |
| 601 | gcgtcgggtt tggagttcaa gtcggtagcc gacagcgttc tgtttttacg tgacaaaaga |
| 661 | tgggaagagg tcagaggtgc cctgatgtct gctttcagtc ctgaaaagct gaacgagatg |
| 721 | gttcccctca tcagccaagc ctgcgacctt ctcctggctc atttaaaacg ctatgcggaa |
| 781 | tctggggacg catttgacat ccagcggtgc tactgcaatt acaccacaga tgtggttgcc |
| 841 | agcgtcgcct ttggcacccc ggtggactcc tggcaggccc ctgaggatcc ctttgtgaaa |
| 901 | cactgcaagc gtttcttcga attctgcatc cccagaccta tcctggtttt actcttatca |
| 961 | tttccatcca taatggtccc actggcccgg attttgccca ataagaaccg agacgaactg |
| 1021 | aatggctttt ttaacaaact cattaggaat gtgattgcct tgcgggacca gcaagctgcc |
| 1081 | gaagagcggc ggagagactt cctccaaatg gtcctggatg cccgacattc tgcaagtccc |
| 1141 | atgggcgtgc aagactttga catcgtcaga gacgttttct cctctactgg gtgcaagccg |
| 1201 | aacccttccc ggcaacacca gcccagccct atggccaggc ctttgactgt ggatgagatt |
| 1261 | gtgggccagg ccttcatctt cctcatcgct ggctatgaaa tcatcaccaa cacactttct |
| 1321 | tttgccacct acctactggc caccaaccct gactgccaag agaagcttct gagagaggta |
| 1381 | gacgttttta aggagaaaca catggcccct gagttctgca gcctcgagga aggcctgccc |
| 1441 | tatctggaca tggtgattgc agagacgctg aggatgtacc cgccagcttt cagattcaca |
| 1501 | cgggaggcag ctcaggactg cgaggtgctg gggcagcgca tccccgcagg cgctgtgcta |
| 1561 | gagatggccg tgggtgccct gcaccatgac cctgagcact ggccaagccc ggagaccttc |
| 1621 | aaccctgcaa ggttcacggc tgaggcccgg cagcagcacc ggcccttcac gtacctgccc |
| 1681 | ttcggggccg gcccacggag ctgcctcggg gtgcgtctag ggctgcttga ggtccagttg |
| 1741 | acactgctcc acgtgctgca caagttccgg ttccaagcct gccctgagac ccaggtaccg |
| 1801 | ctgcagctag aatccaaatc tgccctaggt ccaaaaaatg gtgtctatat caagatcgta |
| 1861 | tcccgctgac acagaaggct gccgggtggg gggagggcac ccccaaattc aaagaaaacc |
| 1921 | ctaagtgtgg atgttcagca ttttggaaaa atgtcactga agtgattgaa agagtgcctg |
| 1981 | gcatgcaagg ataagaggtt ctttacataa catttcctaa atgcttaata aacgtttgtt |
| 2041 | gcacttggtt ttgacattgc caatggggtt tgaaccagtg ctctctctaa atgaaaaaaa |
| 2101 | aaaaaaaaaa a |

SEQ ID NO: 153 Human TBXAS1 Isoform 5 Amino Acid Sequence
(NP_001300957.1)

| | |
|---|---|
| 1 | mvlhisilkt gevrpqtsgq fsfhwkldif ppgflgkpng aqkavwtsvw vrrklnvsim |
| 61 | yylgrrmfiv isepdmikqv lvenfsnftn rmasglefks vadsvlflrd krweevrgal |
| 121 | msafspekln emvplisqac dlllahlkry aesgdafdiq rcycnyttdv vasvafgtpv |
| 181 | dswqapedpf vkhckrffef ciprpilvll lsfpsimvpl arilpnknrd elngffnkli |
| 241 | rnvialrdqq aaeerrrdfl qmvldarhsa spmgvqdfdi vrdvfsstgc kpnpsrqhqp |
| 301 | spmarpltvd eivgqafifl iagyeiitnt lsfatyllat npdcqekllr evdvfkekhm |
| 361 | apefcsleeg lpyldmviae tlrmyppafr ftreaaqdce vlgqripaga vlemavgalh |
| 421 | hdpehwpspe tfnperftae arqqhrpfty lpfgagprsc lgvrlgllev kltllhvlhk |
| 481 | frfqacpetq vplqlesksa lgpkngvyik ivsr |

SEQ ID NO: 154 Mouse TBXAS1 cDNA Sequence (NM_011539.3; CDS: 168-1769)

| | |
|---|---|
| 1 | gcacactcta agaaagagcd cttttggggg actcacttga tgggatgttc agctgactac |
| 61 | ctacttcttt ctccaccacc tatatacaga tcaggactcc tataagggca ggagagcagc |
| 121 | accctctttc ctcctgagga ccacccctcc ggggtctccg aggaaaaatg gaagtgttgg |
| 181 | ggcttctcaa gtttgaagtc agtggtacca tagtgactgt gactctgctc gtggctctct |
| 241 | tggccctcct gaaatggtac tccatgtcag ctttctcaag actggagcag ttgggcatca |
| 301 | ggcaccccaa gccttctcct tttgttggaa acttgatgtt tttccgccag ggtttttggg |
| 361 | agagccaatt ggaactccga gagcgatacg ggcctctgtg tgggtactat cttggccgtc |
| 421 | ggatgcacgt tgtcatttca gagccagaca tgatcaagca ggtgttggtt gagaacttca |
| 481 | gtaacttttc caacagaatg gcctcaggtc tggaacccaa gatggtagca gacagtgtcd |
| 541 | tgttgttacg tgacagaaga tgggaggaag tcaggggtgc cctgatgtct tcattcagtc |
| 601 | ctgaaaagtt ggatgagatg acacctctca tcagccaagc ctgtgaactt ctcgtggctc |
| 661 | acttaaaacg ctatgcagca tccagggacg cattcaacat ccagaggtgt tactgctgtt |
| 721 | acaccataga tgtggtggcc agtgtggcct ttggcaccca ggtggactcc cagaattctc |
| 781 | cagaagatcc ctttgtgcaa cactgccggc gtgcttccac cttctgtatc cccaggcctc |
| 841 | tcctggtatt aatcttatca tttccatcca taatggtccc attggcccgg attctgccca |
| 901 | ataagaaccg agatgaactg aatggctttt ttaacacact cattaggaat gtgattgcct |
| 961 | tacgggacca gcaagcagca gaagagaggc ggagagactt cctgcagatg gtgctggatg |
| 1021 | cccagcactc catgaactct gtgggcgtgg aaggctttga catggtccca gaatccctgt |
| 1081 | cctcttctga gtgcacaaag gaaccacccc aaaggtgcca tcctacctcc acatctaagc |
| 1141 | ctttcactgt ggatgaaatt gtgggccagg ccttcctctt cctcattgcg ggccatgagg |
| 1201 | tcatcacaaa cacgctgtcc ttcatcacat acctgctggc cacccaccct gactgccagg |
| 1261 | agaggcttct gaaagaggtg gacctcttca tggggaagca cccagcccct gagtaccaca |
| 1321 | gcctgcagga aggtctgccg tatctggaca tggtgatttc agagaccctg aggatgtacc |
| 1381 | caccagcttt caggttcaca cgggaggcag cacaggactg tgaggtgctg ggacaacgta |
| 1441 | tccctgcagg tacagtgctg gagatagctg tgggtgccct acaccatgac ccagagcact |
| 1501 | ggccgaatcc tgagaccttt gaccctgaaa ggttcacagc agaggcccgg cttcagcgga |
| 1561 | ggccgttcac atacctgccc tttggagctg gccccaggag ctgcctcgga gtgcggctgg |
| 1621 | gcctgctggt ggtcaagctg acaatactcd aggtcctaca caagttccgc tttgaagcca |
| 1681 | gccctgagac tcaggttcca cttcagctag aatccaaatc tgccctaggc cccaaaaatg |
| 1741 | gagtctacat caagattgtg tcacgctgat atagaaggca cgtgggaaag aggaagcact |
| 1801 | ttgtaatggt aacatctgca catcgctgca ggagggcacc cgggattcag atgaaagcct |
| 1861 | cgtgtggaga tggagagttt ataggaatat atatcttagg gtgatcaaaa gggcacatgg |
| 1921 | catgtgagcc tactttgtca caattcctaa atgtttaata aatgtttacc atgcttcaaa |
| 1981 | aaaaaaaaaa aa |

SEQ ID NO: 155 Mouse TBXAS1 Amino Acid Sequence (NP_035669.3)

| | |
|---|---|
| 1 | mevlgllkfe vsgtivtvtl lvallallkw ysmsafsrle klgirhpkps pfvgnlmffr |
| 61 | qgfwesqlel rerygplcgy ylgrrmhvvi sepdmikqvl venfsnfsnr masglepkmv |
| 121 | adsvlllrdr rweevrgalm ssfspeklde mtplisqace llvahlkrya asrdafniqr |
| 181 | cyccytidvv asvafgtqvd sqnspedpfv qhcrrastfc iprpllvlil sfpsimvpla |
| 241 | rilpnknrde lngffntlir nvialrdqqa aeerrrdflq mvldaqhsmn svgvegfdmv |
| 301 | peslsssect keppqrchpt stskpftvde ivgqaflfli aghevitntl sfityllath |
| 361 | pdcqerllke vdlfmgkhpa peyhslqegl pyldmviset lrmyppafrf treaaqdcev |
| 421 | lgqripagtv leiavgalhh dpehwpnpet fdperftaea rlqrrpftyl pfgagprscl |
| 481 | gvrlgllvvk ltilqvlhkf rfeaspetqv plqlesksal gpkngvyiki vsr |

SEQ ID NO: 156 Human SIGLEC7 Transcript Variant 1 cDNA Sequence
(NM_014385.3; CDS: 70-1473)

| | |
|---|---|
| 1 | gcatttcctg agagaagaac cctgaggaac agacgttccc tcgcggccct ggcacctcca |
| 61 | accccagata tgctgctgct gctgctgctg cccctgctct gggggaggga gagggtggaa |
| 121 | ggacagaaga gtaaccggaa ggattactcg ctgacgatgc agagttccgt gaccgtgcaa |
| 181 | gagggcatgt gtgtccatgt gcgctgctcc ttctcctacc cagtggacag ccagactgac |
| 241 | tctgacccag ttcatggcta ctggttccgg gcagggaatg atataagctg gaaggctcca |
| 301 | gtggccacaa acaacccagc ttgggcagtg caggaggaaa ctcgggaccg attccacctc |
| 361 | cttggggacc cacagaccaa aaattgcacc ctgagcatca gagatgccag aatgagtgat |
| 421 | gcggggagat acttctttcg tatggagaaa ggaaatataa aatggaatta taaatatgac |
| 481 | cagctctctg tgaacgtgac agccttgacc cacaggccca acatccttat ccccggtacc |
| 541 | ctggagtctg gctgcttcca gaatctgacc tgctctgtgc cctgggcctg tgagcagggg |
| 601 | acgcccccta tgatctcctg gatggggacc tctgtgtccc ccctgcaccc ctccaccacc |
| 661 | cgctcctcag tgctcaccct catcccacag ccccagcacc acggcaccag cctcacctgt |
| 721 | caggtgacct tgcctggggc cggcgtgacc acgaacagga ccatccaact caatgtgtca |
| 781 | taccctcctc agaacttgac tgtgactgtc ttccaaggag aaggcacagc atccacagct |
| 841 | ctggggaaca gctcatctct ttcagtccta gagggccagt ctctgcgctt gctctgtgct |
| 901 | gttgacagca atccccctgc caggctgagc tggacctgga ggagtctgac cctgtacccc |
| 961 | tcacagccct caaaccctct ggtactggag ctgcaagtgc acctggggga tgaaggggaa |
| 1021 | ttcacctgtc gagctcagaa ctctctgggt tcccagcacg tttccctgaa cctctccctg |
| 1081 | caacaggagt acacaggcaa aatgaggcct gtatcaggag tgttgctggg ggcggtcggg |
| 1141 | ggcgctggag ccacagccct ggtcttcctc tccttctgtg tcatcttcat tgtagtgagg |
| 1201 | tcctgcagga agaaatcggc aaggccagch gcggacgtgg gagacatagg catgaaggat |
| 1261 | gcaaacacca tcaggggctc agcctctcag ggtaacctga ctgagtcctg ggcagatgat |
| 1321 | aacccccgac accatggcct ggctgcccac tcctcagggg aggaaagaga gctccagtat |
| 1381 | gcacccctca gctttcataa gggggagcct caggacctat caggacaaga agccaccaac |
| 1441 | aatgagtact cagagatcaa gatccccaag taagaaaatg cagaggctcg ggcttgtttg |
| 1501 | agggttcacg acccctccag caaaggagtc tgaggctgat tccagtagaa ttagcagccc |
| 1561 | tcaatgctgt gcaacaagac atcagaactt attcctcttg tctaactgaa aatgcatgcc |
| 1621 | tgatgaccaa actctccctt tccccatcca atcggtccac aatccccgac ctggcctctg |
| 1681 | gtacccacca ttctcctctg tacttctcta aggatgacta ctttagattc cgaatatagt |
| 1741 | gagattgtaa cgtgaaaaaa aaaaaaaaa |

SEQ ID NO: 157 Human SIGLEC7 Isoform 1 Amino Acid Sequence (NP_055200.1)

| | |
|---|---|
| 1 | mllllllpll wgrervegqk snrkdysltm gssvtvqegm cvhvrcsfsy pvdsqtdsdp |
| 61 | vhgywfragn diswkapvat nnpawavqee trdrfhllgd pqtknctlsi rdarmsdagr |
| 121 | yffrmekgni kwnykydqls vnvtalthrp nilipgtles gcfqnltcsv pwaceqgtpp |
| 181 | miswmgtsvs plhpsttrss vltlipqpqh hgtsltcqvt lpgagvttnr tiqlnysypp |
| 241 | qnltvtvfqg egtastalgn ssslsvlegq slrlvcavds npparlswtw rsltlypsgp |
| 301 | snplvlelqv hlgdegeftc raqnslgsqh vslnlslqqe ytgkmrpvsg vllgavggag |
| 361 | atalvflsfc vifivvrscr kksarpaadv gdigmkdant irgsasqgnl teswaddnpr |
| 421 | hhglaahssg eereiqyapl sfhkgepqdl sgqeatnney seikipk |

SEQ ID NO: 158 Human SIGLEC7 Transcript Variant 2 cDNA Sequence
(NM_016543.3; CDS: 70-1194)

| | |
|---|---|
| 1 | gcagttcctg agagaagaac cctgaggaac agacgttccc tcgcggccct ggcacctcca |
| 61 | accccagata tgctgctgct gctgctgctg cccctgctct gggggaggga gagggtggaa |
| 121 | ggacagaaga gtaaccggaa ggattactcg ctgacgctgc agagttccgt gaccgtgcaa |
| 181 | gagggcatgt gtgtccatgt gcgctgctcc ttctcctacc cagtggacag ccagactgac |
| 241 | tctgacccag ttcatggcta ctggttccgg gcagggcatg atataagctg gcaggctcca |
| 301 | gtggccacaa acaacccagc ttgggcagtg caggaggaaa ctcgggaccg attccacctc |
| 361 | cttggggacc cacagaccaa aaattgcacc ctgagcatca gagatgccag aatgagtgat |
| 421 | gcggggagat acttctttcg tatggagaaa ggcaatataa aatggaatta taaatatgac |
| 481 | cagctctctg tgaacgtgac agaccctcct cagaacttga ctgtgactgt cttccaagga |
| 541 | gaaggcacag catccacagc tctggggaac agctcatctc tttcagtcct agagggccag |
| 601 | tctctgcgct tggtctgtgc tgttgacagc aatccccctg ccaggctgag ctggacctgg |
| 661 | aggagtctga ccctgtaccc ctcacaggcc tcaaaccctc tggtactgga gctgcaagtg |
| 721 | cacctggggg atgaagggga attcacctgt cgagctcaga actctctggg ttcccagcac |
| 781 | gtttccctga acctctccct gcaacaggag tacacaggca aaatgaggcc tgtatcagga |
| 841 | gtgttgctgg gggcggtcgg gggagctgga gccacagccc tggtcttcct ctccttctgt |
| 901 | gtcatcttca ttgtagtgag gtcctgcagg aagaaatcgg caaggccagc agcggacgtg |
| 961 | ggagacatag gcatgaagga tgcaaacacc atcaggggct cagcctctca gggtaacctg |
| 1021 | actgagtcct gggcagatga taacccccga caccatggcc tggctgccca ctcctcaggg |
| 1081 | gaggaaagag agatccagta tgcacccctc agctttcata agggggagcc tcaggaccta |
| 1141 | tcaggacaag aagccaccaa caatgagtac tcagagatca agatccccaa gtaagaaaat |
| 1201 | gcagaggctc gggcttgttt gagggttcac gacccctcca gcaaaggagt ctgaggctga |
| 1261 | ttccagtaga attagcagcc ctcaatgctg tgcaacaaga catcagaact tattcctctt |
| 1321 | gtctaactga aaatgcatgc ctgatgacca aactctccct ttccccatcc aatcggtcca |
| 1381 | cactccccgc cctggcctct ggtacccacc attctcctct gtacttctct aaggatgact |
| 1441 | actttagatt ccgaatatag tgagattgta acgtgaaaaa aaaaaaaaaa |

SEQ ID NO: 159 Human SIGLEC7 Isoform 2 Amino Acid Sequence (NP_057627.2)

| | |
|---|---|
| 1 | mllllllpll wgrervegqk snrkdysltm qssvtvqegm cvhvrcsfsy pvdsqtdsdp |
| 61 | vhgywfragn diswkapvat nnpawavqee trdrfhllgd pqtknctlsi rdarmsdagr |
| 121 | yffrmekgni kwnykydqls vnvtdppqnl tvtvfqgegt astalgnsss lsvlegqslr |
| 181 | lvcavdsnpp arlswtwrsl tlypsqpsnp lvlelqvhlg degeftcraq nslgsqhvsl |
| 241 | nlslqqeytg kmrpvsgvll gavggagata lvflsfcvif ivvrscrkks arpaadvgdi |
| 301 | gmkdantirg sasqgnltes waddnprhhg laahssgeer eiqyaplsfh kgepqdlsgq |
| 361 | eatnneysei kipk |

SEQ ID NO: 160 Human SIGLEC7 Transcript Variant 3 cDNA Sequence
(NM_001277201.1; CDS: 70-507)

| | |
|---|---|
| 1 | gcagttcctg agagaagaac cctgaggaac agacgttccc tcgcggccct ggcacctcca |
| 61 | accccagata tgctgctgct gctgctgctg cccctgctct gggggaggga gagggtggaa |
| 121 | ggacagaaga gtaaccggaa ggattactcg ctgacgatgc agagttccgt gaccgtgcaa |
| 161 | gagggcatgt gtgtccatgt gcgctgctcc ttctcctacc cagtggacag ccagactgac |
| 241 | tctgacccag ttcatggcta ctggttccgg gcagggaatg atataagctg gaaggctcca |
| 301 | gtggccacaa acaacccagc ttgggcagtg caggaggaaa ctcgggaccg attccacctc |
| 361 | cttggggacc cacagaccaa aaattgcacc ctgagcatca gagatgccag aatgagtgat |
| 421 | gcggggagat acttctttcg tatggagaaa ggaaatataa aatggaatta taaatatgac |
| 481 | cagctctctg tgaacgtgac agggtaacct gactgagtcc tgggcagatg ataacccccg |
| 541 | acaccatggc ctggctgccc actcctcagg ggaggaaaga gagatccagt atgcacccct |
| 601 | cagctttcat aagggggagc ctcaggacct atcaggacaa gaagccacca acaatgagta |
| 661 | ctcagagatc aagatcccca agtaagaaaa tgcagaggct cgggcttgtt tgagggttca |
| 721 | cgacccctcc agcaaaggag tctgaggctg attccagtag aattagcagc cctcaatgct |
| 761 | gtgcaacaag acatcagaac ttattcctct tgtctaactg aaaatgcatg cctgatgacc |
| 641 | aaactctccc tttccccatc caatcggtcc acactccccg ccctggcctc tggtacccac |
| 901 | cattctcctc tgtacttctc taaggatgac tactttagat tccgaatata gtgagattgt |
| 961 | aacgtgaaaa aaaaaaaaaa a |

SEQ ID NO: 161 Human SIGLEC7 Isoform 3 Amino Acid Sequence
(NP_001264130.1)

| | |
|---|---|
| 1 | mllllllpll wgrervegqk snrkdysltm qssvtvqegm cvhvrcsfsy pvdsqtdsdp |
| 61 | vhgywfragn diswkapvat nnpawavqee trdrfhllgd pqtknctlsi rdarmsdagr |
| 121 | yffrmekgni kwnykydqls vnvtg |

SEQ ID NO: 162 Human DOCK2 Amino Acid Sequence (NP_004937.1)

| | |
|---|---|
| 1 | mapwrkadke rhgvaiynfq gsgapqlslq igdvvriqet cgdwyrgyli khkmaqgifp |
| 61 | ksfihikevt vekrrnteni ipaeiplaqe vtttlwewgs iwkqlyvask kerflqvqsm |
| 121 | mydlmewrsq llsgtlpkde lkelkqkvts kidygnkile ldlivrdedg nildpdntsv |
| 181 | islfhaheea tdkiterike emskdqpdya mysrissspt hslyvfvrnf vcrigedael |
| 241 | fmslydpnkq tvisenylvr wgsrgfpkei emlnnlkvvf tdlgnkdlnr dkiylicqiv |
| 301 | rvgkmdlkdt gakkctqglr rpfgvavmdi tdiikgkaes deekqhfipf hpvtaendfl |
| 361 | hsllgkvias kgdsggqglw vtmkmlvgdi iqirkdyphl vdrttvvark lgfpeiimpg |
| 421 | dvrndiyitl lqgdfdkynk ttqrnvevim cvcaedgktl pnaicvgsgd kpmneyrsvv |
| 461 | yyqvkqprwm etvkvavpie dmqrihlrfm frhrsslesk dkgeknfams yvklmkedgt |
| 541 | tlhdgfhdlv vlkgdskkme dasayltlps yrhhvenkga tlsrssssvg glsvssrdvf |
| 601 | sistlvcstk ltqnvgllgl lkwrmkpqll qenleklkiv dgeevvkflq dtldalfnim |
| 661 | mehsqsdeyd ilvfdaliyi igliadrkfq hfntvleayi qqhfsatlay kklmtvlkty |
| 721 | ldtssrgeqc epilrtlkal eyvfkfivrs rtlfsqlyeg keqmefeesm rrlfesinnl |
| 781 | mksqykttil lqvaalkyip svlhdvemvf dakllsqlly efytcippvk lqkqkvqsmn |
| 841 | eivqsnlfkk qecrdillpv itkelkelle qkddmqhqvl erkycvelln silevlsyqd |
| 901 | aaftyhhiqe imvqllrtvn rtvitmgrdh ilishfvacm tailnqmgdq hysfyietfq |
| 961 | tsselvdflm etfimfkdli gknvypgdwm amsmvqnrvf lrainkfaet mnqkflehtn |
| 1021 | fefqlwnnyf hlavafitqd slqleqfsha kynkilnkyg dmrrligfsi rdmwyklgqn |
| 1061 | kicfipgmvg pilemtlipe aelrkatipi ffdmmlceyq rsgdfkkfen eiilkldhev |
| 1141 | eggrgdeqym qllesilmec aaehptiaks venfvnlvkg lleklldyrg vmtdeskdnr |
| 1201 | msctvnllnf ykdnnreemy irylyklrdi hldcdnytea aytlllhtwl lkwsdeqcas |
| 1261 | qvmqtgqqhp qthrqlketl yetiigyfdk gkmweeaisl ckelaeqyem eifdyellsq |
| 1321 | nliqqakfye simkilrpkp dyfavgyygq gfpsflrnkv fiyrgkeyer redfqmqlmt |
| 1381 | qfpnaekmnt tsapgddvkn apgqyiqcft vqpvldehpr fknkpvpdqi infyksnyvq |
| 1441 | rfhysrpvrr gtvdpenefa smwiertsfv tayklpgilr wfevvhmsqt tisplenaie |
| 1501 | tmstanekil mminqyqsde tlpinplsml lngivdpavm ggfakyekaf fteeyvrdhp |
| 1561 | edqdklthlk dliawqipfl gagikihekr vsdnlrpfhd rmeecfknlk mkvekeygvr |
| 1621 | empdfddrrv grprsmlrsy rqmsiislas mnsdcstpsk ptsesfdlel aspktprveq |
| 1661 | eepispgstl pevklrrskk rtkrssvvfa dekaaaesdl krlsrkhefm sdtnasehaa |
| 1741 | iplkasvlsq msfasqsmpt ipalalsvag ipgldeants prlsqtflql sdgdkktltr |
| 1801 | kkvnqffktm lasksaeegk qipdslstdl |

SEQ ID NO: 163 Human DOCK2 cDNA Sequence (NM_004946.3; CDS: 53-5545)

| | |
|---|---|
| 1 | agccaccccc tgacggcttc cccacgggag gacgcgaggc cccggcccag ccatggcccc |
| 61 | ctggcgcaaa gctgacaagg agcggcacgg cgtggccata tacaacttcc aaggcagcgg |
| 121 | agccccccag ctctccctgc agatcggcga tgtggtgcga atacaggaga cgtgtggaga |
| 181 | ctggtatagg ggatacctca taaagcacaa aatgttacag ggcatttttc ctaagtcatt |
| 241 | tatccacatc aaggaagtga cagttgagaa aagaagaaat actgagaaca tcattcctgc |
| 301 | agaaattcct ctggcacaag aagtgacaac gacactttgg gaatggggaa gcatctggaa |
| 361 | acaactctat gtggccagca aaaaggagcg ttttctccag gtgcagtcca tgatgtacga |
| 421 | tctgatggag tggaggtccc agcttctctc aggaacctta cccaaggatg agctgaagga |
| 481 | actgaagcag aaagtcacgt ccaaaattga ctatggcaac aaaatccttg agcttgattt |
| 541 | gattgtcaga gatgaagacg gaaatatctt ggaccctgat aataccagtg tcatcagctt |
| 601 | gttccatgca catgaggaag caactgataa aatcacagag cgtatcaaag aagaaatgtc |
| 661 | aaaagaccag ccagattatg caatgtattc ccggatctcc tcatccccca cccatagcct |
| 721 | ctatgtgttt gtgagaaact ttgtgtgcag aattggggaa gatgctgagc tcttcatgtc |
| 781 | tctctacgac cccaacaagc aaacggtcat aagtgagaac tacctagtgc gatggggcag |
| 841 | ccggggcttc cctaaggaga ttgagatgct caacaatctg aaggtggtct tcacggatct |
| 901 | tggaaacaaa gacctcaaca gggataaaat ttacttgatt tgtcaaatag tccgggtcgg |
| 961 | caagatggat cttaaggata ctggtgcaaa gaagtgcacg cagggactga ggaggccctt |
| 1021 | tggggtggca gttatggata taacagacat catcaagggg aaagcagaga gtgatgaaga |
| 1081 | aaagcagcac ttcattcctt ttcacccggt tacagctgag aatgacttcc tacacagcct |
| 1141 | gctgggcaaa gtcatagcct ccaaggggga cagtggaggg caaggcctct gggtgaccat |
| 1201 | gaagatgctg gtgggtgaca tcattcagat tcgcaaggac tatccacacc tggtggacag |
| 1261 | gaccaccgtg gtggccagga agctgggatt cccagagatc atcatgccag gggatgtcag |
| 1321 | gaacgacatc tacattactc tcttacaagg tgactttgac aagtacaaca agaccacaca |
| 1381 | gaggaatgtg gaagtcatca tgtgtgtgtg cgcggaggat ggcaaaacgc tgcctaatgc |
| 1441 | aatttgcgtg ggagcagggg acaagcccat gaatgagtat cgctccgttg tgtactatca |
| 1501 | agtcaaacag ccacgctgga tggaaacagt caaggtggct gtccctattg aagacatgca |
| 1561 | gaggatccat ctgcgattca tgtttcgaca tcggtcatct ctggaatcta aagataaagg |
| 1621 | agaaaagaac tttgccatgt cctatgtgaa gctgatgaaa gaagatggga ctactctaca |
| 1681 | cgatggattc catgacttag ttgtcctcaa gggggacagc aagaagatgg aggatgccag |
| 1741 | cgcatacctg acccttcctt cttatcgaca ccatgtggaa aacaaggggg ccacgctgag |
| 1801 | caggagctcc agcagtgttg gggggctttc tgtcagctcc cgggatgtgt tctccatttc |
| 1861 | caccctggtg tgctccacaa agctcactca gaatgtgggc ttgctgggtt tgctgaagtg |
| 1921 | gcgtatgaag cctcaactgc tacaggagaa tttagaaaag ttgaagattg tggatggaga |
| 1981 | ggaagtggtg aagtttctcc aggatactct ggatgccctc ttcaacatca tgatggagca |
| 2041 | ttctcaaagt gatgaatatg acatcctcgt ctttgatgcc ttgatttaca taataggact |
| 2101 | cattgcagac cggaaatttc agcatttcaa caccgttctg gaggcttaca tccaacagca |
| 2161 | tttcagtgcg accttggctt acaagaaatt gatgacagtg ctgaagactt acttggatac |
| 2221 | ctccagcaga ggggagcaat gtgagccaat cctaagaacg ctgaaggctt tggaatatgt |
| 2281 | gttcaagttc attgttcggt cgaggacatt attttcacag ctttatccag gcaaagaaca |
| 2341 | gatggagttt gaagaatcca tgagacggct ctttgaatcc atcaacaatc tgatgaaaag |
| 2401 | tcaatacaaa actaccatcc ttttgcaggt ggcggctttg aaatacatcc catctgtcct |
| 2461 | gcatgatgta gaaatggtct ttgatgcgaa gttactcagc caactcctgt atgagttcta |
| 2521 | cacctgcatc cctcctgtga aactccagaa gcagaaagta cagtctatga atgagatagt |
| 2581 | ccagagcaac ctctttaaaa agcaagaatg ccgggacatt ctgcttcctg tcatcaccaa |
| 2641 | agagctgaag gagctgctgg agcagaagga tgacatgcaa caccaggtcc tggagaggaa |
| 2701 | gtactgcgtt gaattgctca acagcatctt ggaagtcctt agctaccagg atgcggcctt |
| 2761 | cacctaccac catatccagg agatcatggt ccagctgctg cggacagtga accggacagt |
| 2821 | catcaccatg ggcggggatc acattctgat tagtcacttt gtggcatgta tgacagccat |
| 2881 | cttaaaccag atgggtgacc agcactactc cttctacatt gagaccttcc agaccagctc |
| 2941 | tgaacttgtg gacttcttga tggagacctt catcatgttc aaggacctca ttggaaagaa |
| 3001 | cgtgtaccct ggagactgga tggccatgag catggttcaa aacagggtct tcctgagagc |
| 3061 | tatcaacaag tttgcagaaa ccatgaacca gaagttccta gaacacacga actttgagtt |
| 3121 | ccagctgtgg aacaactatt ttcatctggc agtggctttt atcaccgarm attctctgca |
| 3181 | gctggagcag ttctcacacg ccaaatacaa caaaatcctg aataagtatg gggacatgag |
| 3241 | acggctaatt ggcttctcca tccgtgatat gtggtacaag cttggtcaga acaaaatctg |
| 3301 | cttcatccca ggcatggtag gacctatatt agagatgaca cttatccctg aggctgagct |
| 3361 | ccggaaagcc accataccaa tcttcttcga catgatgctg tgtgaatatc aaagaagtgg |
| 3421 | ggatttaact aagtttgaaa acgaaatcat cctgaagctg gaccacgagg tagaaggggg |
| 3481 | ccgaggcgac gagcagtaca tgcagctcct ggagtcaatc ctgatggaat gtgctgcaga |
| 3541 | gcacccaacc attgccaagt cggtggagaa cttcgtgaac ctggtcaaag gcctcctgga |
| 3601 | gaagctgctg gattaccggg gtgtgatgac agatgagagc aaagacaacc gcatgagctg |
| 3661 | caccgtgaac ctgctgaatt tctacaaaga taacaacagg gaggagatgt acataaggta |
| 3721 | cctgtacaaa ctccgcgatc ttcacctgga ctgtgacaat tacacagagg ctgcctacac |
| 3781 | gctccttctc cacacctggc ttctcaagtg gtcggatgag cagtgtgcat cacaggtcat |
| 3841 | gcagacaggc cagcagcacc cccagacaca ccggcagctg aaggagacgc tctacgagac |
| 3901 | catcataggc tactttgaca aaggaaagat gtgggaagag gccataagtc tgtgcaagga |
| 3961 | gctggcggaa cagtacgaga tggagatctt tgactatgag ctgctcagcc agaacctgat |
| 4021 | ccagcaggca aaattctatg aaagcatcat gaaaatcctc aggcccaaac cagactactt |
| 4081 | tgctgttgga tactacggcc agggattccc ctccttcctg cggaacaaag tgttcatcta |
| 4141 | ccgcgggaag gaatatgagc gaagagaaga tttccagatg cagctgatga cccagttccc |
| 4201 | caatgcagag aagatgaaca ccacctctgc cccgggagat gatgtgaaga atgccccagg |
| 4261 | ccagtatatc cagtgcttca ctgtccagcc tgtcttggat gaacatccca ggttcaagaa |
| 4321 | taagccagtg cctgaccaga ttataaactt ctacaaatcc aactacgtgc aaaggttcca |
| 4381 | ctactcccgg cccgtgcgca gggggaccgt agacccagag aatgagtttg cttcgatgtg |
| 4441 | gattgagaga acctccttcg tgactgcata caagctgccg gggatcctgc gctggtttga |
| 4501 | ggtggtgcac atgtcgcaga ccacaattag tcctctggag aatgccatag aaaccatgtc |
| 4561 | cacggccaat gagaagatcc tgatgatgat aaaccagtac cagagtgatg agaccctccc |
| 4621 | catcaaccca ctctccatgc tcctgaacgg gattgtggac cctgctgtca tgggaggctt |
| 4681 | cgccaagtat gagaaggcct tcttcactga agagtatgtc agggaccacc ctgaggacca |
| 4741 | ggacaagctg acccacctca aggacctgat tgcatggcag atccccttct tgggagctgg |
| 4801 | gattaagatc catgagaaaa gggtgtcaga taacttgcga cccttccatg accggatgga |
| 4861 | ggaatgtttc aagaacctga aaatgaaggt ggagaaggag tacggtgtcc gagagatgcc |
| 4921 | tgactttgac gacaggagag tgggccgtcc caggtctatg ctgcgctcat acagacagat |
| 4981 | gtccatcatc tctctggctt ccatgaattc tgactgcagc acccccagca agcctacctc |
| 5041 | agagagcttt gacctggaat tagcatcacc caagacgccg agagtggagc aggaggaacc |
| 5101 | gatctccccg gggagcaccc tgcctgaggt caagctgcgg aggtccaaga agaggacaaa |
| 5161 | gagaagcagc gtagtttttg cggatgagaa agcagctgca gagtcggacc tgaagcggct |
| 5221 | ttccaggaag catgagttca tgagtgacac caacctctcg gagcatgcgg ccatccccct |
| 5281 | caaggcgtct gtcctctctc aaatgagctt tgccagccag tccatgccta ccatcccagc |
| 5341 | cctggcgctc tcagtggcag gcatccctgg gttggatgag gccaacacat ctccccgcct |
| 5401 | cagccagacc ttcctccaac tctcagatgg tgacaagaag acactcacac ggaagaaggt |
| 5461 | caatcagttc ttcaagacaa tgctggccag caaatcggct gaagaaggca aacagatccc |
| 5521 | agactcgctg tccacggacc tgtgagctgc tgctgactag ggctgcatgg gagagccagg |
| 5581 | gaggggagtt tctggaagag ga.aagccat cgtggaacat cgaagcctca gagagtggga |
| 5641 | gactgtcccc atcagttgtc cttacttaga ggagacagag aggccaatca ggtcccagag |
| 5701 | cttgaatgct aacaagccca gcatcccctg gggctgtgat catggtggat gaggaagcct |
| 5761 | caacgtagat tcctgaactc aaggtaccag caagaatgcc ttctcccagt gtgctctccc |
| 5821 | caacatccta ggcacagctt tcataaccca gtttcttagg tgtaagaaac tgtttttatc |
| 5881 | tcatttatta agtctcagaa cttaacagaa aaggaagcct tttaaatatt ctttttaatt |
| 5941 | ttattttaga ttaacagttt tgtactttac atttttttat acaaccaacc agtttctttt |
| 6001 | ctagccaatc atctctgaag agttgctgtt tcttactgac aataaaaaat gttctcttgg |
| 6061 | ttcgaataa |

SEQ ID NO: 164 Mouse DOCK2 Amino Acid Sequence (NP_203538.2)

| | |
|---|---|
| 1 | mapwrktdke rhgvaiynfq gseaqhltlq igdvvriqet cgdwyrgyli khklsqgifp |
| 61 | tsfihlkevt vekrtnieni ipaeiplaqe vtttlwewgs iwkqlyvask kerflqvqsm |
| 121 | mydlmewrsq llsgtlpkde lkelkqkvts kidygnkile ldlivrdedg nildpdktsv |
| 181 | islfhaheea tykiterike emskdqpdyg vysrissspt hslyvfvrnf vcrigedael |
| 241 | fmslydphkq tvisenylvr wgskgfpkei emlnnlkvvf tdlgnkdlnr dkiflicqiv |
| 301 | rigkmdlkdi nakkctqglr rpfgvavmdi tdiikgkaes deekghfipf hpvsaendfl |
| 361 | hsllgkvias kgdsggqglw vtmkmlvgdi iqirkdyphl vdrttvvark lgfpeiimpg |
| 421 | dvrndiyitl lqgdfdkytk ttqrnvevim cvctedgkvl pnaicvgagd kamneyhsvv |
| 481 | yyqvkqprwm etvkvavpie dmqrihlrfm frhrsslesk dkgeknfams yvklmkedgt |
| 541 | tlhdgyhelv vlkgdskkme dasayltlps yrhpvenkga tlsrssssvg glsvssrdvf |
| 601 | sistlvcstk ltqnvgllgl lkwrmkpqll qenleklkiv dgeevvkflq dtldalfnim |
| 661 | mehsqsneyd ilvfdaliyi igliadrkfq hfntvleayi qqhfsatlay kklmtvlkty |
| 721 | ldtssrgeqc epilrtlkal eyvfkfivrs rtlfsqlyeg keqmefeesm rrlfesinnl |
| 781 | mksqykttil lqvaalkyip svlhdvetvf dakllsqlly efytcippvk lqkqkvqsmn |
| 841 | eivqsnlfkk qecrdillpv itkelkelle qrddgqhqae kkhcvellns ilevlscqda |
| 901 | aftydhiqei mvqllrtvnr tvitmgrdha lishfvacmt aildqmgdqh ysfyietfqt |
| 961 | ssdlvdflme tfimfkdlig knvypgdwma msmvqnrvfl rainkfaetm nqkflehtsf |
| 1021 | efqlwnnyfh lavafitqds lqleqfthak ynkilnkygd mrrligfsir dmwyklgqnk |
| 1081 | icfipgmvgp ilemtlipea elrkatipif fdmmlceyqr tgafkkfene iilkldheve |
| 1141 | ggrgdeqymq llesilmect aehptiaksv enfvslvkgl leklldyrgv mtdeskdnrm |
| 1201 | sctvnllnfy kdnnreemyi rylyklrdlh ldcenyteaa ytlllhtwll kwsdeqcasq |
| 1261 | vmqtgqqnpq thrqlketly etiigyfdkg kmweeaislc kelaeqyeme ifdyellsqh |
| 1321 | ltqqakfyen imkilrtkpd yfavgyygqg fpsflrnkvf iyrgkeyerr edfqmqllsq |
| 1381 | fpnaekmntt sapgddvrna pgqyiqcftv qpvldehprf knkpvpdqii nfyksnvvqk |
| 1441 | fhysrpvrrg kvdpenefas mwiertsflt ayklpgilrw fevvhmsqtt isplenaiet |
| 1501 | mstvnekilm minqyqsdes lpinplsmll ngivdpavmg gfakyekaff teeysrehpe |
| 1561 | dqdklshlkd liawqipflg agikihekrv sdnlrpfhdr meecfknlkm kvekeygvre |
| 1621 | mpdfedrrvg rprsmlrsyr qmsvislasm hsdcstpskv paesfdlesa ppktpkveee |
| 1681 | pispgstlpe vklrrskkrt krssvvfade kaatesdlkr lsrkqefmsd tnlsehaaip |
| 1741 | arvsilsqms fasqsmptip altlsvagvp gldeantspr lsqtffqvsd gdkktlkkkk |
| 1801 | vnqffktmla sksseeskqi pdflstnm |

SEQ ID NO: 165 Mouse DOCK2 cDNA Sequence (NM_033374.3; CDS: 83-5569)

| | |
|---|---|
| 1 | agtggggccc tgcaaggcgc ctaaccaccc cagccagctt cttcactaga gaacaggagg |
| 61 | ctctcaaggc tccggtcttg ccatggcccc ctggcgcaaa actgacaagg agcgtcacgg |
| 121 | agtggctatc tacaacttcc aaggcagtga aggccagcat ctcacgctac agattggcga |
| 181 | tgtggtacga atacaggaga cctgtggaga ctggtacaga gggtacctca taaagcataa |
| 241 | actgtcacag ggcattttcc ctacatcctt tatccatctc aaggaagtga cagtggagas |
| 301 | gagaaggaac atagagaaca tcattcctgc agaaatccct ctggcacaag aagtgacaac |
| 361 | cacgctctgg gagtggggaa gcatctggaa gcagctctat gtggccagca aaaaggaacg |
| 421 | cttcctccaa gtgcagtcca tgatgtacga cctgatggaa tggcgctctc agctcctctc |
| 481 | aggaacgcta cccaaggatg agctgaagga actgaagcag aaagtcacat cgaagatcga |
| 541 | ctatggcaac aaastccttg agctcgatct cattgtcaga gatgaagatg gaaacatact |
| 601 | ggaccctgat aagaccagcg tcatcagctt gttccatgct cacgaggagg caacttacaa |
| 661 | aatcacagag cgcatcaaag aagaaatgtc aaaagaccag ccagattatg gggtttattc |
| 721 | tcggatctcc tgatccccca cccacagcct ctacgtcttt gtgagaaact ttgtgtgccg |
| 781 | aattggggag gatgctgagc tcttcatgtc tctctatgac cctcacaagc aaacggtcat |
| 841 | cagtgagaac tatctggtgc gatggggcag caaaggattc ccaaaggaaa ttgagatgct |
| 901 | caataacctg aaggtagtct tcacggatct tggaaataaa gacctcaaca gggataagat |
| 961 | tttcttgatc tgtcaaatag tccgaattgg gaagatggat cttaaggaca ttaatgccaa |
| 1021 | gaagtgcacc caggggctga ggagaccttt tggggtggca gttatggaca tcaccgacat |
| 1081 | catcaagggc aaggcagaga gcgacgaaga gaagcaacat tttattccat ttcacccggt |
| 1141 | ctcagctgag aacgatttcc ttcacagcct tctgggcaaa gtcatagctt ccaagggaga |
| 1201 | cagtggaggg caaggccttt gggtgaccat gaagatgctg gtgggggaca tcattcagat |
| 1261 | ccgtaaagac tacccacact tggtggacag gaccactgtg gtagcccgaa agctgggctt |
| 1321 | cccagagatc atcatgccag gggatgtcag gaacgacatc tacatcactc tcttacaagg |
| 1381 | tgactttgac aagtacacca agaccacaca gcggaacgtg gaagtgatca tgtgtgtgtg |
| 1441 | cacagaggat ggcaaagtgg tacctaatgc aatttgtgtg ggagcggggg ataaggccat |
| 1501 | gaacgagtac cactcagtcg tctactacca agtcaaacag ccccgatgga tggaaacagt |
| 1561 | caaggtggct gtccctattg aagatatgca gaggatccat ttgaggttca tgtttcgaca |
| 1621 | ccgctcatca ctagaatcta aagataaagg agaaaagaac tttgccatgt cctacgtgaa |
| 1681 | actcatgaaa gaagatggaa ccactctgca tgatggatac cacgagttgg tggttctcaa |
| 1741 | gggagacagc aagaaaatgg aagatgccag cgcttacctg acacttcctt cttatcgaca |
| 1801 | ccccgtggaa aacaagggag ctacgctgag ccggaggtcc agcagtgttg ggggcctttc |
| 1861 | tgtcagctcc cgggatgtgt tctccatttc cacgctagtg tgctccacaa agctgaccca |
| 1921 | gaatgtgggt ttgcttggct tgctgaagtg gcgtatgaag ccacaactgc tccaggagaa |
| 1981 | tctagagaag ttgaagattg tggatggcga gccagtagtg aagttcctcc aggacactct |
| 2041 | ggatgccctc ttcaacatca tgatggaaca ctctcagagt aacgagtatg acatcctcgt |
| 2101 | ctttgatgct ttgatctata taataggact cattgcagac cggaaattcc agcattttaa |
| 2161 | caccgtattg gaggcttaca tccaacagca tttcagtgct accttggcct acaagaaact |
| 2221 | gatgacggtg ctgaagactt acttggatac ctccagcagg ggggagcagt gcgagcccat |
| 2281 | cctcagaacg ctcaaagcct tagaatacgt gttcaagttc attgttcggt cgaggacatt |
| 2341 | attctcacag ctttacgaag ggaaagagca gatggagttt gaagaatcca tgagacggct |
| 2401 | cttcgaatcc atcaacaacc tgatgaaaag tcagtacaag accaccatcc tattgcaggt |
| 2461 | ggcggctttg aaatacatcc cttcagtcct tcacgatgtg gaaacagtct ttgatgccaa |
| 2521 | gttgctcagc cagctactgt atgagttcta cacctgcatc cctcccgtga agctgcagaa |
| 2581 | gcagaaagtt cagtccatga atgagatcgt gcagagcaac ctcttcaaaa agcaagaatg |
| 2641 | ccgggacatt ctgcttcctg tcatcaccaa agagctgaag gagctgctgg agcagaggga |
| 2701 | cgatgggcag caccaggctg agaagaagca ctgtgtggaa cttctcaaca gcatcttgga |
| 2761 | ggtcctcagc tgtcaggatg cggccttcac ttatgaccac atccaagaga tcatggtcca |
| 2821 | gctgcttcgc acagtgaacc ggacagtcat cacgatgggc cgagatcacg ctttgattag |
| 2881 | tcactttgtg gcgtgtatga cagctatctt agaccagatg ggcgaccaac actattcatt |
| 2941 | ttacattgag accttccaga ccagctcaga ccttgtggac ttcttgatgg agacattcat |
| 3001 | catgttcaag gacctcattg ggaagaatgt gtatcctggg gactggatgg ccatgagcat |
| 3061 | ggtccagaac cgggtcttcc tgagagccat caacaagttt gcagaaacca tgaaccagaa |
| 3121 | gtttctggaa cacacaagct ttgagttcca gctgtggaac aactattttc atctggcagt |
| 3181 | tgcctttatc actcaggact ctctgcagct ggagcagttc acacacgcta agtacaacaa |
| 3241 | aatcctgaat aagtacgggg acatgagacg gctcatagga ttctccatcc gtgatatgtg |
| 3301 | gtacaagctt ggccagaaca aaatctgctt catcccgggc atggtgggac ctatattaga |
| 3361 | gatgacactt atccctgagg ctgagctcag gaaagccacc atcccaatct tcttcgacat |
| 3421 | gatgctgtgt gaatatcaaa ggactggggc tttcaaaaag tttgaaaatg aaatcatcct |
| 3481 | gaagctggac catgaggtgg aaggaggccg gggggatgag cagtacatgc aactgctgga |
| 3541 | gtccatcctg atggagtgca cagcggaaca cccaaccatt gccaagtcgg tggagaactt |
| 3601 | tgtgagcttg gtcaaagggc tgctggagaa gttgctagat taccggggcg tgatgacaga |
| 3661 | tgagagcaaa gacaaccgta tgagctgcac agtgaacttg ctgaatttct acaaagataa |
| 3721 | caaccgggaa gagatgtaca taagatacct gtataaactg cgtgaccttc acttggactg |
| 3781 | tgaaaactac acagaggctg cctacacact cctcctccac acctggcttc tcaagtggtc |
| 3841 | agatgagcag tgtgcatccc aggtcatgca gacaggccag cagcaccctc agacccaccg |
| 3901 | gcagctgaag gagacactct atgagaccat tataggctac tttgacaaag gaaagatgtg |
| 3961 | ggaagaggcc atcagcctgt gcaaggaact ggcggaacaa tatgagatgg agatctttga |
| 4021 | ctacgagcta ctcagccaga acctgaccca gcaggccaaa ttctatgaaa acatcatgaa |
| 4081 | aatcctcaga accaaaccag actactttgc tgttggatac tatggccagg gattcccctc |
| 4141 | ctttctgcgg aacaaagtgt tcatctaccg aggcaaggaa tatgagcgaa gagaagactt |
| 4201 | ccagatgcag cttttgagcc agttccccaa cgcagaaaag atgaacacaa cttctgcccc |
| 4261 | aggagacgat gtgaggaatg ccccaggcca gtacatccag tgtttcactg tgcagcctgt |
| 4321 | tctggatgaa caccccaggt tcaagaacaa accggtgcct gaccagatca taaactttta |
| 4381 | caagtctaat tatgtgcaaa agttccacta ctccaggcct gtgcgcaggg gcaaggtaga |
| 4441 | cccagagaac gagtttgctt ccatgtggat cgagaggact tccttcctga cggcctacaa |
| 4501 | gctgcctggc atcctgcgct ggtttgaggt agttcacatg tctcagacca caattagtcc |
| 4561 | tctggagaat gccatcgaga ctatgtccac agtcaacgag aagatcctga tgatgataaa |
| 4621 | ccagtaccag agtgatgaaa gcctccccat caaccctctc tccatgctcc tcaatgggat |
| 4681 | cgtggaccct gctgtcatgg gaggcttcgc caagtatgag aaggccttct tcactgaaga |
| 4741 | gtatagcagg gagcacccgg aggaccagga caagctgagc catctcaagg acctgattgc |
| 4801 | atggcagatc cctttcctgg gagctgggat taagatccac gagaaaaggg tgtcagacaa |
| 4861 | cctgcgcccc ttccatgacc ggatggagga gtgcttcaag aacctgaaaa tgaaggtgga |
| 4921 | aaaggagtat ggtgtccgag agatgcctga cttcgaagac aggagagtgg gccgccccag |
| 4981 | gtccatgctg cgttcctaca ggcagatgtc cgtcatctct ctggcctcca tgcattctga |
| 5041 | ctgcagcact cccagcaaag tccccgcaga aagttttgac ctagagtcag ccccacccaa |
| 5101 | gactcccaaa gtggaggagg agcccatctc cccagggagc actctgccag aggtcaagct |
| 5161 | gcggcggtcc aagaaaagga ccaagaggag cagcgtggtg tttgcagacg agaaggcagc |
| 5221 | aacggagtca gacctgaagc ggctttctag aaagcaagag ttcatgagtg acaccaacct |
| 5281 | ctcagagcat gcagccatcc ctgccagggt gtctatcctc tctcagatga gttttgccag |
| 5341 | ccagtccatg cccaccatcc cagccctcac actctccgtg gcaggcgtgc ctgggttgga |
| 5401 | tgaggccaac acatctcccc gcctgagtca gaccttcttc caagtctcag atggtgacaa |
| 5461 | gaagaccctg aaaaagaaga aagtcaatca attcttcaag accatgctgg ctagcaagtc |
| 5521 | gagtgaagaa agcaagcaga tcccagactt cctgtccacc aacatgtgag gcactgctga |
| 5581 | gccgagcact gtgggaactc gagcgggaat gcatgagtat gaccttggag ttccacaagg |
| 5641 | agacaagtct gtaaaagaga cagatgatct caaggggccc ccagaactca agtgatgact |
| 5701 | agccttgcat ctcctgtggc cactacaaca gtgatggatg actcaacaga caaagaagcc |
| 5761 | ccaccatgga ttgttggacc ccaaggagcc agcaagtgcc caatgaatgt tctccccagc |
| 5821 | atccaaggga cgcatgtcat aactcaaatt cacagctagg aggagctgtc ttctgtttca |
| 5881 | ttcctaagtg tcagcactta aaagaactga tttaaatgtt ctattttccc ttaacatttt |
| 5941 | tgtactttta catttttttt ctaataagcc ccttgctact ccatcatctc cagactgctg |
| 6001 | ctctttctta cccacattaa aaatgaccca tagctcaaat gaaccttgtt gctgagtctc |
| 6061 | ttattgaagg actgaggaga aagatcccag gatgggaggc agcccagggg actacagcaa |
| 6121 | tatgaaaggc ttatgttggc tcatctcaat gccatgtttt ctctccttgc tcaggcaaac |
| 6181 | tcaagaatct tctctgctct aagaaagaag caggaatgag atttcttcta atttctccat |
| 6241 | tgtttagtta ttttgatttg agatacttta ctgatataca agctatttaa actatttggg |
| 6301 | gaaaaaagca atgtttgaga tagctaatat aatggcttct caatggaatg atagcacaat |
| 6361 | ttgaaatgat accaaaaaga ataataaaat gaaccgtttg aggtttgctt aaaaaaaaaa |
| 6421 | aaaaaaaaaa a |

*The nucleic acid and polypeptide sequences of the biomarkers encompassed by the present invention listed in Table 1 have been submitted at GenBank under the unique identifier provided herein and each such uniquely identified sequence submitted at GenBank is hereby incorporated in its entirety by reference.
*Included in Table 1 are RNA nucleic acid molecules (e.g., thymidines replaced with uridines), nucleic acid molecules encoding orthologs of the encoded proteins, as well as DNA or RNA nucleic acid sequences comprising a nucleic acid sequence having at least 80%, 81%, 82%, 83%, 84%, 85%, 86%, 87%, 88%, 89%, 90%, 91%, 92%, 93%, 94%, 95%, 96%, 97%, 98%, 99%, 99.5%, or more identity across their full length with the nucleic acid sequence of any publicly available sequence listed in Table 1 (see below for example), or a portion thereof Such nucleic acid molecules can have a function of the full-length nucleic acid as described further herein.
*Included in Table 1 are orthologs of the proteins, as well as polypeptide molecules comprising an amino acid sequence having at least 80%, 81%, 82%, 83%, 84%, 85%, 86%, 87%, 88%, 89%, 90%, 91%, 97%, 93%, 94%, 95%, 96%, 97%, 98%, 99%, 99.5%, or more identity across their full length with an amino acid sequence of any publicly available sequence listed in and Table I (see below for example), or a portion thereof. Such polypeptides can have a function of the full-length polypeptide as described further herein.
*Included in Table 1 are additional known nucleic acid and amino acid sequences for the listed biomarkers.

TABLE 2
CD53
FERMT3
CD37
CXorf21
CD48
CD84
SEQ ID NO: 166 Human CD53 Transcript Variant 1 cDNA Sequence
(NM_001040033.1; CDS: 172-831)

| | |
|---|---|
| 1 | gaggacagac tgaagaaaca tccaaggtgg tcttgaagga cactgggatc ctgtaacaca |
| 61 | gccccggata tctgtgttac cagccttgtc tcggccacct caaggataat cactaaattc |
| 121 | tgccgaaagg actgaggaac ggtgcctgga aaagggcaag aatatcacgg catgggcatg |
| 181 | agtagcttga aactgctgcc gtatgtcctg tttttcttca acttgctctt ttggatctgt |
| 241 | ggctgctgca ttttgggctt tgggatctac ctgctgatcc acaacaactt cggagtgctc |
| 301 | ttccataacc tcccctccct cacgctgggc aatgtgtttg tcatcgtggg ctctattatc |
| 361 | atggtagttg ccttcctggg ctgcatgggc tctatcaagg aaaacaagtg tctgcttatg |
| 421 | tcgttcttca tcctgctgct gattatcctc cttgctgagg tgaccttggc catcctgctc |
| 481 | tttgtatatg aacagaagct gcctgagtat gtggctaagg gtctgaccga cagcatccac |
| 541 | cgttaccact cagacaatag caccaaggca gcgtgggact ccatccagtc atttctgcag |
| 601 | tgttgtggta taaatggcac gagtgattgg accagtggcc caccagcatc ttgcccctca |
| 661 | gatcgaaaag tggagggttg ctatgcgaaa gcaagactgt ggtttcattc caatttcctg |
| 721 | tatatcggaa tcatcaccat ctgtgtatgt gtgattgagg tgttggggat gtcctttgca |
| 781 | ctgaccctga actgccagct tgacaaaacc agccagacca tagggctatg atctgcagta |
| 841 | gtcctgtggt gaagagactt gtttcatctc cggaaatgca aaaccattta tagcatgaag |
| 901 | ccctacatga tcactgcagg atgatcctcc tcccatcctt tcccttttta ggtccctgtc |
| 961 | ttatacaacc agagcagtgg gtgttggcca ggcacatccc atctcaggca gcaagacaat |
| 1021 | ctttcactca ctgacggcag cagccatgtc tctcaaagtg gtgcaactaa tatctgagca |
| 1081 | tcttttagac aagagaggca aagacaaact ggatttaatg gcccaacatc aaagggtgaa |
| 1141 | cccaggatat gaatttttgc atcttcccat tgtcgaatta gtctccagcc tctaaataat |
| 1201 | gcccagtctt ctccccaaag tcaagcaaga gactagttga agggagttct ggggccaggc |
| 1261 | tcactggacc attgtcacaa ccctctgttt ctctttgact aagtgccctg gctacaggaa |
| 1321 | ttacacagtt ctctttctcc aaagggcaag atctcatttc aatttcttta ttagagggcc |
| 1381 | ttattgatgt gttctaagtc tttccagaaa aaaactatcc agtgatttat atcctgattt |
| 1441 | caaccagtca cttagctgat aatcacagta agaagacttc tggtattatc tctctatcag |
| 1501 | ataagatttt gttaatgtac tattttactc ttcaataaat aaaagtttat tatctcaatc |
| 1561 | acaacattgc ta |

SEQ ID NO: 167 Human CD53 Isoform 1 Amino Acid Sequence (NP_000551.1 and
NP_001035122.1)

| | |
|---|---|
| 1 | mgmsslkllk yvlfffnllf wicgccilgf giyllihnnf gvlfhnlpsl tlgnvfvivg |
| 61 | siimvvaflg cmgsikenkc llmsffilll iillaevtla illfvyeqkl neyvakgltd |
| 121 | sihryhsdns tkaawdsiqs flqccgingt sdwtsgppas cpsdrkvegc yakarlwfhs |
| 181 | nflyigiiti cvcvievlgm sfaltlncqi dktsqtigl |

SEQ ID NO: 168 Human CD53 Transcript Variant 2 cDNA Sequence (NM_000560.3;
CDS: 167-826)

| | |
|---|---|
| 1 | gtcgtcacag catgatcata ttttttcacc cttcacttct ccttttacac aaatagcccc |
| 61 | ggatatctgt gttaccagcc ttgtctcggc cacctcaagg ataatcacta aattctgccg |
| 121 | aaaggactga ggaacggtgc ctggaaaagg gcaagaatat cacggcatgg gcatgagtag |
| 181 | cttgaaactg ctgaagtatg tcctgttttt cttcaacttg ctcttttgga tctgtggctg |
| 241 | ctgcattttg ggctttggga tctacctgct gatccacaac aacttcggag tgctcttcca |
| 301 | taacctcccc tccctcacgc tgggcaatgt gtttgtcatc gtgggctcta ttatcatggt |
| 361 | agttgccttc ctgggctgca tgggctctat caaggaacac aagtgtctgc ttatgtcgtt |
| 421 | cttcatcctg ctgctgatta tcatccttgc tgaggtgacc ttggccatcc tgctctttgt |
| 481 | atatgaacag aagctgaatg agtatgtggc taagggtctg accgacagca tccaccgtta |
| 541 | ccactcagac aatagcacca aggcagcgtg ggactccatc cagtcatttc tgcagtgttg |
| 601 | tggtataaat ggcacgagtg attggaccag tggcccacca gcatcttgcc cctcagatcg |
| 661 | aaaagtggag ggttgctatg cgaaagcaag actgtggttt cattccaatt tcctgtatat |
| 721 | cggaatcatc accatctgtg tatgtgtgat tgaggtgttg gggatgtcct ttgcactgac |
| 781 | cctgaactgc cagattgaca aaacgagcca gaccataggg ctatgatctg cagtagtcct |
| 841 | gtggtgaaga gacttgtttc atctccggaa atgcaaaacc atttatagca tgaagcccta |
| 901 | catgatcact gcaggatgat cctcctccca tcctttccct ttttaggtcc ctgtcttata |
| 961 | caaccagaga agtgggtgtt ggccaggcac atcccatctc aggaagcaag acaatctttc |
| 1021 | actcactgac ggcagcagcc atgtctctca aagtggtgaa actaatatct gagcatcttt |
| 1081 | tagacaagag aggcaaagac aaactggatt taatggccca acatcaaagg gtgaacccag |
| 1141 | gatatgaatt tttgcatctt cccattgtcg aattagtctc cagcctctaa ataatgccca |
| 1201 | gtcttctccc caaagtcaag caagagacta gttgaaggga gttctggggc caggctcact |
| 1261 | ggaccattgt cacaaccctc tgtttctctt tgactaagtg ccctggctac aggaattaca |
| 1321 | cagttctctt tctccaaagg gcaagatctc atttcaattt ctttattaga gggccttatt |
| 1381 | gatgtgttct aagtctttcc agaaaaaaac tatccagtga tttatatcct gatttcaacc |
| 1441 | agtcacttag ctgataatca cagtaagaag acttctggta ttatctctct atcagataag |
| 1501 | attttgttaa tgtactattt tactcttcaa taaataacag tttattatct caatcacaac |
| 1561 | attgcta |

SEQ ID NO: 169 Human CD53 Isoform 2 Amino Acid Sequence (NP_001307567.1)

| | |
|---|---|
| 1 | mgmsslkllk yvlfffnllf wicgccilgf giyllihnnf gvlfhnlpsl tlgnvfvivg |
| 61 | siimvvaflg cmgsikenkc llmsffilll iillaevtla illfvyeqkg cyakarlwfh |
| 121 | snflyigiit icvcvievlg msfaltlncq idktsqtigl |

SEQ ID NO: 170 Human CD53 Transcript Variant 3 cDNA Sequence
(NM_001320638.1; CDS: 167-649)

| | |
|---|---|
| 1 | gtcgtcacag catgatcata ttttttcacc cttcacttct ccttttacac aaatagcccc |
| 61 | ggatatctgt gttaccagcc ttgtctcggc cacctcaagg ataatcacta aattctgccg |
| 121 | aaaggactga ggaacggtgc ctggaaaagg gcaagaatat cacggcatgg gcatgagtag |
| 181 | cttgaaactg ctgaagtatg tcctgttttt cttcaacttg ctcttttgga tctgtggctg |
| 241 | ctgcattttg ggctttggga tctacctgct gatccacaac aacttcggag tgctcttcca |
| 301 | taacctcccc tccctcacgc tgggcaatgt gtttgtcatc gtgggctcta ttatcatggt |
| 361 | agttgccttc ctgggctgca tgggctctat caaggaaaac aagtgtctgc ttatgtcgtt |
| 421 | cttcatcctg ctgctgatta tcctccttgc tgaggtgacc ttggccatcc tgctctttgt |
| 481 | atatgaacag aagggttgct atgcgaaagc aagactgtgg tttcattcca atttcctgta |
| 541 | tatcggaatc atcaccatct gtgtatgtgt gattgaggtg ttggggatgt cctttgcact |
| 601 | gaccctgaac tgccagattg acaaaaccag ccagaccata gggctatgat ctgcagtagt |
| 661 | cctgtggtga agagacttgt ttcatctccg gaaatgcaaa accatttata gcatgaagcc |
| 721 | ctacatgatc actgcaggat gatcctcctc ccatcctttc cctttttagg tccctgtctt |
| 781 | atacaaccag agaagtgggt gttggccagg cacatcccat ctcaggcagc aagacaatct |
| 841 | ttcactcact gacggcagca gccatgtctc tcaaagtggt gaaactaata tctgagcatc |
| 901 | ttttagacaa gagaggcaaa gacaaactgg atttaatggc ccaacatcaa agggtgaacc |
| 961 | caggatatga atttttgcat cttcccattg tcgaattagt ctccagcctc taaataatgc |
| 1021 | ccagtcttct ccccaaagtc aagcaagaga ctagttgaag ggagttctgg ggccaggctc |
| 1081 | actggaccat tgtcacaacc ctctgtttct ctttgactaa gtgccctggc tacaggaatt |
| 1141 | acacagttct ctttctccaa agggcaagat ctcatttcaa tttctttatt agagggcctt |
| 1201 | attgatgtgt tctaagtctt tccagaaaaa aactatccag tgatttatat cctgatttca |
| 1261 | accagtcact tagctgataa tcacagtaag aagacttctg gtattatctc tctatcagat |
| 1321 | aagattttgt taatgtacta ttttactctt caataaataa aagtttatta tctcaatcac |
| 1381 | aacattgcta |

SEQ ID NO: 171 Mouse CD53 cDNA Sequence (NM_007651.3; CDS: 200-859)

| | |
|---|---|
| 1 | agtctcactt cctcactctt ctcgcttggg tttcctgtcg tcacagcatg attgtatttt |
| 61 | ttctctcttc acttctcctt ttacacaaat agacatagac ttctgggtta caggctgtgc |
| 121 | tggccaccta aaagataatc agtgaattct acctgaagta ctgagggaca ctgccttcaa |
| 181 | aagggcatac tatcccagca tgggcatgag cagcctgaaa ttgctgaaat atgttctgtt |
| 241 | tatctttaac ttgctttttt gggtctgtgg ctgttgcatt ttgggctttg gcatctattt |
| 301 | cctggtccaa aatacctatg gagtactctt ccgtaacctt cccttcctga cacttggcaa |
| 361 | cattctggtc attgtgggat ccattatcat ggtagttgcc ttcttgggtt gcatgggctc |
| 421 | aatcaaggaa aataagtgcc tgcttatgtc gttctttgtt ctgctgctga ttattctcct |
| 481 | tgctgaggtg accatagcca tcctgctctt tgtgtatgaa caaaaactca acactttagt |
| 541 | ggctgagggt ctgaatgaca gcatccaaca ttatcactct gacaacagca ctatgcaggc |
| 601 | atgggacttc atccagacac aactgcagtg ttgtggtgta aatggctcaa gtgattggac |
| 661 | cagtggtcca ccatcttcct gcccatcagg tgcagatgtt cagggttgct ataataaggc |
| 721 | aaaatcgtgg tttcactcca atttcttgta tattggaatc attaccatct gtgtatgtgt |
| 781 | gatacaggtg ctgggaatgt cctttgcact gacactcaac tgccagattg acaaaacaag |
| 841 | ccaggcttta gggctgtgac ttgcaacttc cccctgctta agtgacttat tcctctctag |
| 901 | aaagtcaaag catccattcc atgagaactt aaacaattac ctgcctgact ggcattttgg |
| 961 | cttcttctta ttccatcttt gactggatct ctgtcttata cacatccact gaagagaata |
| 1021 | tttgtcatgg acttcccata tcaagcagaa gacaaacatt aaccaactga tagcagtaac |
| 1081 | catatccctt aaagatggtg aaacatacct gggtgttttt ggtttttttt ttttttttac |
| 1141 | atacttgggt atttttttta aagagacact gtagcactgg tggcttgaga tccactgcca |
| 1201 | gctgctggtg tggttatttc tcagagtact agcctagcaa atgtgagccc ttgagtttag |
| 1261 | ccccaaatac tacaaaaaag aggtccaagt ttaaatgtta gtctcctaac aactgtcaaa |
| 1321 | tcaatttcta gcctctaaat cttgctactt ccactctaca aagtcacata agagagaagc |
| 1381 | tgatggaaat ttttgagtcc cattcattag ataattgaca tactcagttt ccttttgaac |
| 1441 | acagtccttg gtaataggaa tcatacagaa atcttttatt tctggaaaat attccaatLt |
| 1501 | ctttgtctta ttgattttgt tccatccatc catccagaaa agattattcc catcctattg |
| 1561 | ttagtcagtc tggtagcctt gaattacatt gccataaaac aacccagaag tattaatatc |
| 1621 | tccagtgtgt tagctgataa tcacatccat gtctatgttt tatttctcta ttaaataagg |
| 1681 | ttctgttaat gtaccatttt aacctgttaa taaacaaaag tttataatca ctatgcatca |
| 1741 | aacatttgac tcattctgat atttctgtta caagccaaat atatgttata tttctgtata |
| 1801 | acaaattagt tcaaaatgta gtggctaaga acctatatat ttgttttata aattgactga |
| 1861 | tttaaagaca gcattttgct atgtagccca ggctgtcttg gaacttacta tatgaccaaa |
| 1921 | gatggcacca aactcatgat taccctgctt ttaacttctg aatattagaa ttacagttaa |
| 1981 | gtgctactaa gtcagaacaa acatttattg tctgatggct ttatgtaatc aggagtgtgg |
| 2041 | aagtagctta gaaaaatgat tatagatagt tgtttcttgc atatagtgat taagtggtca |
| 2101 | gccatatctt ccatcatctc atgtctcatt ggaaaattaa tccattgtca tgttctcata |
| 2161 | tagttgtaat gaacctcata taatggccac acataagttt atatgggtag tttcgtgaat |
| 2221 | aatgagacag gtaagacata aaatgatagg tagcatccaa gacaaaagtc atagcacttt |
| 2281 | tataacttaa cccagaaatg atggcatcag ttattctggg tcaaaagttc aatttccacc |
| 2341 | cagggcaaaa ttacacaaca ggcatatgac ttctaggaag ttgagatcat tgatggccac |
| 2401 | atgagagatt gctaaccatc tcatgcttac tatgtcaaaa aatatggtgt acttgtctat |
| 2461 | attatgtata tacataacta tattctataa agtaaaaaat tagaacacat ataatgccta |
| 2521 | atttatagaa ctcacaagaa tagaaaataa ttggtttttg ttttagaaat gttctgtaga |
| 2581 | attctctgac ttgctttaag gaaaactggt tattttcgtg gtgctctata gggaaaatat |
| 2641 | ctattgcatt ttctgagtca tataaagagt catgtattcc tctttgttca gactaacact |
| 2701 | tagtggtgac attaccagta agttttcctg cctaatgcct gagctttgtt cttagctcta |
| 2761 | ctttgttctt cactcccaat aaaatgttat ggagttctaa gg |

SEQ ID NO: 172 Mouse CD53 Amino Acid Sequence (NP_031677.1)

| | |
|---|---|
| 1 | mgmsslkllk yvlfifnllf wvcgccilgf giyflvqnty gvlfrnlpfl tlgnilvivg |
| 61 | siimvvaflg cmgsikenkc llmsffvlll iillaevtia illfvyeqkl ntlvaeglnd |
| 121 | siqhyhsdns tmkawdfiqt qlqccgvngs sdwtsgppss cpsgadvqgc ynkakswfhs |
| 181 | nflyigiiti cvcviqvlgm sfaltlncqi dktsqalgl |

SEQ ID NO: 173 Human FERMT3 Transcript Variant 1 cDNA Sequence
(NM_178443.2; CDS: 150-2153)

| | |
|---|---|
| 1 | ccgccctgct cgtgataagg cacaagcaag ggctgccctg aaggaagctc caaagagaaa |
| 61 | ggagggcagg aagcccacgg cccacagggg tgtagcccga gacccacctg cagcccccag |
| 121 | cccttgccag gaaagcagca gccgcagcca tggcggggat gaagacagcc tccggggact |
| 181 | acatcgactc gtcatgggag ctgcgggtgt ttgtgggaga ggaggaccca gaggccgagt |
| 241 | cggtcaccct gcgggtcact ggggagtcgc acatcggcgg ggtgctcctg aagattgtgg |
| 301 | agcagatcaa tcgcaagcag gactggtcag accatgctat ttggtgggaa cagaagaggc |
| 361 | agtggctgct gcagacccac tggacactgg acaagtacgg gatcctggcc gacgcacgcc |
| 421 | tcttctttgg gccccagcac cggcccgtca tccttcggtt gcccaaccgc cgcgcactgc |
| 481 | gcctccgtgc cagcttctcc cagcccctct tccaggctgt ggctgccatc tgccgcctcc |
| 541 | tcagcatccg gcaccccgag gagctgtccc tgctccgggc tcctgagaag aaggagaaga |
| 601 | agaagaaaga gaaggagcca gaggaagagc tctatgactt gagcaaggtt gtcttggctg |
| 661 | ggggcgtggc acctgcactg ttccggggga tgccagctca cttctcggac agcgcccaga |
| 721 | ctgaggcctg ctaccacatg ctgagccggc cccagccgcc acccgacccc ctcctgctcc |
| 781 | agcgtctgcc acggcccagc tccctgtcag acaagaccca gctccacagc aggtggctgg |
| 841 | actcgtcgcg gtgtctcatg cagcagggca tcaaggccgg ggacgcactc tggctgcgct |
| 901 | tcaagtacta cagcttcttc gatttggatc ccaagacaga ccccgtgcgg ctgacacagc |
| 961 | tgtatgagca ggcccggtgg gacctgctgc tggaggagat tgactgcacc gaggaggaga |
| 1021 | tgatggtgtt tgccgccctg cagtaccaca tcaacaagct gtcccagagc ggggaggtgg |
| 1081 | gggagccggc tggcacagac ccagggctgg acgacctgga tgtggccctg agcaacctgg |
| 1141 | aggtgaagct ggaggggtcg gcgcccacag atgtgctgga cagcctcacc accatcccag |
| 1201 | agctcaagga ccatctccga atctttcgca tcccacgaag gccccggaag ctgagcctga |
| 1261 | agggctaccg ccaacactgg gtggtgttca aggagaccac actgtcctac tacaagagcc |
| 1321 | aggacgaggc ccctggggac cccattcagc agctcaacct caagggctgt gaggtggttc |
| 1381 | ccgatgttaa cgtctccggc cagaagttct gcattaaact cctagtgccc tcccctgagg |
| 1441 | gcatgagtga gatctacctg cggtgccagg atgagcagca gtatgcccgc tggatggctg |
| 1501 | gctgccgcct ggcctccaaa ggccgcacca tggccgacag cagctacacc agcgaggtgc |
| 1561 | aggccatcct ggccttcctc agcctgcagc gcacgggcag tgggggcccg ggcaaccacc |
| 1621 | cccacggccc tgatgcctct gccgagggcc tcaaccccta cggcctcgtt gccccccgtt |
| 1681 | tccagcgaaa gttcaaggcc aagcagctca ccccacggat cctggaagcc caccagaatg |
| 1741 | tggcccagtt gtcgctggca gaggcccagc tgcgcttcat ccaggcctgg cagtccctgc |
| 1801 | ccgacttcgg catctcctat gtcatggtca ggttcaaggg cagcaggaaa gacgagatcc |
| 1861 | tgggcatcgc caacaaccga ctgatccgca tcgacttggc cgtgggcgac gtggtcaaga |
| 1921 | cctggcgttt cagcaacatg cgccagtgga atgtcaactg ggacatccgg caggtggcca |
| 1981 | tcgagtttga tgaacacatc aatgtggcct tcagctgcgt gtctgccagc tgccgaattg |
| 2041 | tacacgagta tatcgggggc tacattttcc tgtcgacgcg ggagcgggcc cgtggggagg |
| 2101 | agctggatga agacctcttc ctgcagctca ccgggggcca tgaggccttc tgagggctgt |
| 2161 | ctgattgccc ctgccctgct caccaccctg tcacagccac tcccaagccc acacccacag |
| 2221 | gggctcactg ccccacaccc gctccaggca ggcacccagc tgggcatttc acctgctgtc |
| 2281 | actgactttg tgcaggccaa ggacctggca gggccagacg ctgtaccatc acccaggcca |
| 2341 | gggatggggg tgggggtccc tgagctcatg tggtgccccc tttccttgtc tgagtggctg |
| 2401 | aggctgatac ccctgaccta tctgcagtcc cccagcacac aaggaagacc agatgtagct |
| 2461 | acaggatgat gaaacatggt ttcaaacgag ttctttcttg ttacttttta aaatttcttt |
| 2521 | tttataaatt aatattttat tgttggatcc tcaaaaaaga aaaaaaaaaa |

SEQ ID NO: 174 Human FERMT3 Isoform 1 Amino Acid Sequence (NP_848537.1)

| | |
|---|---|
| 1 | magmktasgd yidsswelrv fvgeedpeae svtlrvtges higgvllkiv eqinrkqdws |
| 61 | dhaiwweqkr qwllqthwtl dkygiladar lffgpqhrpv ilrlpnrral rlrasfsqpl |
| 121 | fqavaaicrl lsirhpeels llrapekkek kkkekepeee lydlskvvla ggvapalfrg |
| 181 | mpahfsdsaq teacyhmlsr pqpppdplll qrlprpssls dktqlhsrwl dssrclmqqg |
| 241 | ikagdalwlr fkyysffdld pktdpvrltq lyeqarwdll leeidcteee mmvfaalqyh |
| 301 | inklsqsgev gepagtdpgl ddldvalsnl evklegsapt dvldslttip elkdhlrifr |
| 361 | iprrprkltl kgyrghwvvf kettlsyyks qdeapgdpiq qlnlkgcevv pdvnvsgqkf |
| 421 | cikllvpspe gmseiylrcq deqqyarwma gcrlaskgrt madssytsev qailaflslq |
| 481 | rtgsggpgnh phgpdasaeg lnpyglvapr fqrkfkakql tprileahqn vaqlslaeaq |
| 541 | lrfiqawqsl pdfgisyvmv rfkgsrkdei lgiannrlir idlavgdvvk twrfsnmrqw |
| 601 | nvnwdirqva iefdehinva fscvsascri vheyiggyif lstrerarge eldedlflql |
| 661 | tggheaf |

SEQ ID NO: 175 Human FERMT3 Transcript Variant 2 cDNA Sequence
(NM_031471.5; CDS: 150-2141)

| | |
|---|---|
| 1 | ccgccctgct cgtgataagg cacaagcaag ggctgccctg agggaagctc caaagagaaa |
| 61 | ggagggcagg aagcccacgg cccacagggg tgtagcccga gacccacctg cagcccccag |
| 121 | cccttgccag gaaagcagca ggcggagcca tggcggggat gaagacagcc tccggggact |
| 181 | acatcgactc gtcatgggag ctgcgggtgt ttgtgggaga ggaggaccca gaggccgagt |
| 241 | cggtcaccct gcgggtcact ggggagtcgc acatcggcgg ggtgctcctg aagattgtgg |
| 301 | agcagatcaa tcgcaagcag gactggtcag accatgctat ttggtgggaa cagaagaggc |
| 361 | agtggctgct gcagacccac tggacactgg acaagtacgg gatcctggcc gacgcacgcc |
| 421 | tcttctttgg gccccagcac cggcccgtca tccttcggtt gcccaaccgc cgcgcactgc |
| 481 | gcctccgtgc cagcttctcc cagcccctct tccaggctgt ggctgccatc tgccgcctcc |
| 541 | tcagcatccg gcaccccgag gagctgtccc tgctccgggc tcctgagaag aaggagaaga |
| 601 | agaagaaaga gaaggagcca gaggaagagc tctatgactt gagcaaggtt gtcttggctg |
| 661 | ggggcgtggc acctgcactg ttccggggga tgccagctca cttctcggac agcgcccaga |
| 721 | ctgaggcctg ctaccacatg ctgagccggc cccagccgcc acccgacccc ctcctgctcc |
| 781 | agcgtctgcc acggcccagc tccctgtcag acaagaccca gctccacagc aggtggctgg |
| 841 | actcgtcgcg gtgtctcatg cagcagggca tcaaggccgg ggacgcactc tggctgcgct |
| 901 | tcaagtacta cagcttcttc gatttggatc ccaagacaga ccccgtgcgg ctgacacagc |
| 961 | tgtatgagca ggcccggtgg gacctgctgc tggaggagat tgactgcacc gaggaggaga |
| 1021 | tgatggtgtt tgccgccctg cagtaccaca tcaacaagct gtcccagagc ggggaggtgg |
| 1081 | gggagccggc tggcacagac ccagggctgg acgacctgga tgtggccctg agcaacctgg |
| 1141 | aggtgaagct ggaggggtcg gcgcccacag atgtgctgga cagcctcacc accatcccag |
| 1201 | agctcaagga ccatctccga atctttcggc cccggaagct gaccctgaag ggctaccgcc |
| 1261 | aacactgggt ggtgttcaag gagaccacac tgtcctacta caagagccag gacgaggccc |
| 1321 | ctggggaccc cattcagcag ctcaacctca agggctgtga ggtggttccc gatgttaacg |
| 1381 | tctccggcca gaagttctgc attaaactcc tagtgccctc ccctgagggc atgagtgaga |
| 1441 | tctacctgcg gtgccaggat gagcagcagt atgcccgctg gatggctggc tgccgcctgg |
| 1501 | cctccaaagg ccgcaccatg gccgacagca gctacaccag cgaggtgcag gccatcctgg |
| 1561 | ccttcctcag cctgcagcgc acgggcagtg ggggcccggg caaccacccc cacggccctg |
| 1621 | atgcctctgc cgagggcctc aacccctacg gcctcgttgc cccccgtttc cagcgaaagt |
| 1681 | tcaaggccaa gcagctcacc ccacggatcc tggaagccca ccagaatgtg gcccagttgt |
| 1741 | cgctggcaga ggcccagctg cgcttcatcc aggcctggca gtccctgccc gacttcggca |
| 1801 | tctcctatgt catggtcagg ttcaagggca gcaggaaaga cgagatcctg ggcatcgcca |
| 1861 | acaaccgact gatccgcatc gacttggccg tgggcgacgt ggtcaagacc tggcgtttca |
| 1921 | gcaacatgcg ccagtggaat gtcaactggg acatccggca ggtggccatc gagtttgatg |
| 1981 | aacacatcaa tgtggccttc agctgcgtgt ctgccagctg ccgaattgta cacgagtata |
| 2041 | tcgggggcta cattttcctg tcgacgcggg agcgggcccg tggggaggag ctggatgaag |
| 2101 | acctcttcct gcagctcacc gggggccatg aggccttctg agggctgtct gattgcccct |
| 2161 | gccctgctca ccaccctgtc acagccactc ccaagcccac acccacaggg gctcactgcc |
| 2221 | ccacacccgc tccaggcagg cacccagctg ggcatttcac ctgctgtcac tgactttgtg |
| 2281 | caggccaagg acctggcagg gccagacgct gtaccatcac ccaggccagg gatgggggtg |
| 2341 | ggggtccctg agctcatgtg gtgccccctt tccttgtctg agtggctgag gctgataccc |
| 2401 | ctgacctatc tgcagtcccc cagcacacaa ggaagaccag atgtagctac aggatgatga |
| 2461 | aacatggttt caaacgagtt ctttcttgtt actttttaaa atttcttttt tataaattaa |
| 2521 | tattttattg ttggatcctc aaaaaaaaaa aaaaaaaa |

SEQ ID NO: 176 Human FERMT3 Isoform 2 Amino Acid Sequence (NP_113659.3)

| | |
|---|---|
| 1 | magmktasgd yidsswelrv fvgeedpeae svtlrvtges higgvllkiv eqinrkqdws |
| 61 | dhaiwweqkr qwllqthwtl dkygiladar lffgpghrpv ilrlpnrral rlrasfsqpl |
| 121 | fqavaaicrl lsirhpeels llrapekkek kkkekepeee lydlskvvla ggvapalfrg |
| 181 | mpahfsdsaq teacyhmlsr pqpppdplll qrlprpssls dktqlhsrwl dssrclmqqg |
| 241 | ikagdalwlr fkyysffdld pktdpvrltq lyeqarwdll leeidcteee mmvfaalqyh |
| 301 | inklsqsgev gepagtdpgl ddldvalsnl evklegsapt dvldslttip elkdhlrifr |
| 361 | prkltlkgyr qhwvvfkett lsyyksqdea pgdpiqqlnl kgcevvpdvn vsgqkfcikl |
| 421 | lvpspegmse iylrcqdeqq yarwmagcrl askgrtmads sytsevqqil aflslqrtgs |
| 481 | ggpgnhphgp dasaeglnpy glvaprfqrk fkakqltpri leahqnvaql slaeaqlrfi |
| 541 | qawqslpdfg isyvmvrfkg srkdeilgia nnrliridla vgdvvktwrf snmrqwnvnw |
| 601 | dirqvaiefd ehinvafscv sascrivhey iggyiflstr erargeelde dlflqltggh |
| 661 | eaf |

SEQ ID NO: 177 Mouse FERMT3 Transcript Variant 2 cDNA Sequence
(NM_001362399.1; CDS: 210-2207)

| | |
|---|---|
| 1 | gtggagccct ctgcgtgctg gcagtgtgct tcctgtaccc agcaacagcc cgccctgggg |
| 61 | agggactagt acaactttca tgataaggcc actacaggct gacctctgta ggaagcaact |
| 121 | gagcaggacc aggccagacc agggtaacag gtgtcccact gccacctgca gctgcagccc |
| 181 | gttgcaggct agcagaaaca gccgcagcca tggcgggtat gaagacagcc tccggggact |
| 241 | atatcgactc ttcctgggag ctgagggtgt ttgtgggcga ggaggaccct gaggcccagt |
| 301 | ctgtcacact ccgagtcacg ggggagtcgc acattggtgg ggtacttctg aagatcgtgg |
| 361 | aggaaatcaa tcgcaagcag gactggtctg accatgccat ttggtgggag cagaagagac |
| 421 | agtggctgct gcagacacac tggacgctgg acaagtacgg gattctggcc gatgcccgcc |
| 481 | tcttctttgg gccacagcac cgacctgtca tcctgcgact gcccaacaga cgtgtgctgc |
| 541 | ggcttcgggc cagtttctcc aagcccctct tccaaacggt ggctgccatc tgccgcctcc |
| 601 | tcagtatcag gcacccagag gagctgtctc tgctgcgtgc tccagagaag aaggagaaga |
| 661 | agaagaagga gaaggagcct gaagaggagg tgcatgacct gacaaaggtt gtcttagctg |
| 721 | gcggtgtggc acccacttta ttcagaggca tgccagcaca cttctcggac agcgcccaga |
| 781 | ctgaggcttg ttaccacatg ctgagccggc cacagccggc acctgaccct ctcctgctcc |
| 841 | agcgcctgcc aaggcccagc tccctgcctg acaagaccca gctccacagc aggtggctgg |
| 901 | attcatctcg gtgcctcatg cagcaaggta tcaaggccgg ggatgtgctt tggctgcgat |
| 961 | ttaagtacta cagctttttt gacctggatc ccaagacaga ccctgtgcgg ctgacccagc |
| 1021 | tgtatgagca ggcccgctgg gacttactga cagaggagat cgactgcact gaagaagaga |
| 1081 | tgatggtgtt tgctgccctg cagtaccaca tcaacaaact gaccctgagc ggggatgtgg |
| 1141 | gtgagctggc ctctggggac ctgggactgg atgacctgga tgcagccctg aacaacctgg |
| 1201 | aggtgaagct gaaggggtca gcaccctcag acatgctgga tagtctcact accatcccag |
| 1261 | aactcaagga ccatctccgg atcttccggc cccggaagct gaccctgaag ggctaccgcc |
| 1321 | agtactgggt ggtatttaag gacaccacac tgtcctacta taagagccaa gatgaagcac |
| 1381 | cgggggaccc tacccagcag ctcaacctca agggctgtga ggtggtccct gatgtcaatg |
| 1441 | tctctggcca gaagttctgc atcaaactcc tggtaccctc accagagggc atgagtgaga |
| 1501 | tctacctgag gtgccaggat gaacagcagt acgcacagtg gatggctgcc tgccgactgg |
| 1561 | cctccaaggg ccgcaccatg gcggacagca gctatgccag cgaggtgcag gccattctgg |
| 1621 | ccttcctcag cctgcagcgg gcaggtggta gcaatggagg ctcagggaac aaacctcaag |
| 1681 | gtcctgaagc ccctgctgag ggccttaacc cctatggcct cgtggctcct cggttccagc |
| 1741 | gaaagttcaa ggccaagcag ctcaccccaa ggatcctgga agctcaccaa aacgtggccc |
| 1801 | aactctcact gaccgaggcc cagctgcgct ttatccaggc ctggcaatcc ttgcccgact |
| 1861 | ttggcatctc ctatgtgatg gtcaggttca agggcagcag gaaagatgag atcctaggca |
| 1921 | ttgccaacaa ccgactcatc cggattgatc tggccgtggg tgacgtggtc aagacctggc |
| 1981 | gcttcagcaa catgcggcaa tggaacgtca actgggacat acggcaggtg gccattgagt |
| 2041 | tcgatgaaca catcaatgtg gccttcagct gtgtgtctgc tagctgccgc atcgtgcacg |
| 2101 | agtacatcgg gggttacatc ttcctgtcca cccgagagcg ggcccgaggg gaagagctgg |
| 2161 | atgaggatct gttcctgcag cttacaggag gccatgaggc cttctgaggg cagcccctgc |
| 2221 | tccactcacc acctccaggg accccccaaa ggccacaccc acctgaacac actgctccat |
| 2281 | cactcccggg atgtacactg ctgggcaact tcacttgttg tcaccaggca ggccagggcc |
| 2341 | ctcgctgggg taggtgctac caccagccag cctagggatg atgggccctg agccacacag |
| 2401 | agccacctcc ctcaccctgt tggcagaagc tcacaccccc gacctctatg tagtccctaa |
| 2461 | gcacacgacg aatgccagac acggatgagg aaccacaaat cctggtttga agctggactt |
| 2521 | tctttctgtg tctgtttcag gttttttaat aaataaatat tttattgttg gatctttctt |
| 2581 | cttcctcctc |

SEQ ID NO: 178 Mouse FERMT3 Transcript Variant 1 cDNA Sequence
(NM_153795.2; CDS: 207-2204)

| | |
|---|---|
| 1 | gtggagccct ctgcgtgctg gcagtgtgct tcctgtaccc agcaacagcc cgccctgggg |
| 61 | agggactagt acaactttca tgataaggcc actacaggct gacctctgaa ggaagcaact |
| 121 | gagcaggacc aggccagacc agggtaacag gtgtcccact gccacctgca gctgcagccc |
| 181 | gttgcaggct agaaacagcc gcagccatgg cgggtatgaa gacagcctcc ggggactata |
| 241 | tcgactcttc ctgggagctg agggtgtttg tgggcgagga ggaccctgag gcccagtctg |
| 301 | tcacactccg agtcacgggg gagtcgcaca ttggtggggt acttctgaag atcgtggagg |
| 361 | aaatcaatcg caagcaggac tggtctgacc atgccatttg gtgggagcag aaaagacagt |
| 421 | ggctgctgca gacacactgg acgctggaca agtacgggat tctggccgat gcccgcctct |
| 481 | tctttgggcc acagcaccga cctgtcatcc tgcgactgcc caacagacgt gtgctgcggc |
| 541 | ttcgggccag tttctccaag cccctcttcc aaacggtggc tgccatctgc cgcctcctca |
| 601 | gtatcaggca cccagaggag ctgtctctgc tgcgtgctcc agagaagaag gagaagaaga |
| 661 | agaaggagaa ggagcctgaa gaggaggtgc atgacctgac aaaggttgtc ttagctggcg |
| 721 | gtgtggcacc cactttattc agaggcatgc cagcacactt ctcggacagc gcccagactg |
| 781 | aggcttgtta ccacatgctg agccggccac agccggcacc tgaccctctc ctgctccagc |
| 841 | gcctgccaag gcccagctcc ctgcctgaca agacccagct ccacagcagg tggctggatt |
| 901 | catctcggtg cctcatgcag caaggtatca aggccgggga tgtgctttgg ctgcgattta |
| 961 | agtactacag cttttttgac ctggatccca agacagaccc tgtgcggctg acccagctgt |
| 1021 | atgagcaggc ccgctgggac ttactgacag aggagatcga ctgcactgaa gaagagatga |
| 1081 | tggtgtttgc tgccctgcag taccacatca acaaactgac cctgagcggg gatgtgggtg |
| 1141 | agctggcctc tggggacctg ggactggatg acctggatgc agccctgaac aacctggagg |
| 1201 | tgaagctgaa ggggtcagca ccctcagaca tgctggatag tctcactacc atcccagaac |
| 1261 | tcaaggacca tctccggatc ttccggcccc ggaagctgac cctgaagggc taccgccagt |
| 1321 | actgggtggt atttaaggac accacactgt cctactataa gagccaagat gaagcaccgg |
| 1381 | gggaccctac ccagcagctc aacctcaagg gctgtgaggt ggtccctgat gtcaatgtct |
| 1441 | ctggccagaa gttctgcatc aaactcctgg taccctcacc agagggcatg agtgagatct |
| 1501 | acctgaggtg ccaggatgaa cagcagtacg cacagtggat ggctgcctgc cgactggcct |
| 1561 | ccaagggccg caccatggcg gacagcagct atgccagcga ggtgcaggcc attctggcct |
| 1621 | tcctcagcct gcagcgggca ggtggtagca atggaggctc agggaacaaa cctcaaggtc |
| 1681 | ctgaagcccc tgctgagggc cttaacccct atggcctcgt ggctcctcgg ttccagcgaa |
| 1741 | agttcaaggc caagcagctc accccaagga tcctggaagc tcaccaaaac gtggcccaac |
| 1801 | tctcactgac cgaggcccag ctgcgcttta tccaggcctg gcaatccttg cccgactttg |
| 1861 | gcatctccta tgtgatggtc aggttcaagg gcagcaggaa agatgagatc ctaggcattg |
| 1921 | ccaacaaccg actcatccgg attgatctgg ccgtgggtga cgtggtcaag acctggcgct |
| 1981 | tcagcaacat gcggcaatgg aacgtcaact gggacatacg gcaggtggcc attgagttcg |
| 2041 | atgaacacat caatgtggcc ttcagctgtg tgtctgctag ctgccgcatc gtgcacgagt |
| 2101 | acatcggggg ttacatcttc ctgtccaccc gagagcgggc ccgaggggaa gagctggatg |
| 2161 | aggatctgtt cctgcagctt acaggaggcc atgaggcctt ctgagggcag cccctgctcc |
| 2221 | actcaccacc tccagggacc ccccaaaggc cacacccacc tgaacacact gctccatcac |
| 2281 | tcccgggatg tacactgctg ggcaacttca cttgttgtca ccaggcaggc cagggccctc |
| 2341 | gctggggtag gtgctaccac cagccagcct agggatgatg ggccctgagc cacacagagc |
| 2401 | ccctcctctc accctgttgg cagaagctca cacccccgac ctctatgtag tccctaagca |
| 2461 | cacgacccat gccagacacg gatgaggaac cacaaatcct ggtttgaagc tggactttct |
| 2521 | ttctgtgtct gtttcaggtt ttttaataaa taaatatttt attgttggat ctttcttctt |
| 2581 | cctcctc |

SEQ ID NO: 179 Mouse FERMT3 Amino Acid Sequence (NP_001349328.1 and
NP_722490.1)

| | |
|---|---|
| 1 | magmktasgd yidsswelrv fvgeedpeaq svtlrvtges higgvllkiv eeinrkqdws |
| 61 | dhaiwweqkr qwllqthwtl dkygiladar lffgpqhrpv ilrlpnrrvl rlrasfskpl |
| 121 | fqtvaaicrl lsirhpeels llrapekkek kkkekepeee vhdltkvvla ggvaptlfrg |
| 181 | mpahfsdsaq teacyhmlsr pqpapdplll qrlprpsslp dktqlhsrwl dssrclmqqg |
| 241 | ikagdvlwlr fkyysffdld pktdpvrltq lyeqarwdll teeidcteee mmvfaalqyh |
| 301 | inkltlsgdv gelasgdlgi ddldaalnnl evklkgsaps dmldslttip elkdhlrifr |
| 361 | prkltlkgyr qywvvfkdtt lsyyksqdea pgdptqqlnl kgcevvpdvn vsgqkfcikl |
| 421 | lvpspegmse iylrcqdeqq yaqwmaacrl askgrtmads syasevqail aflslqragg |
| 481 | snggsgnkpq gpeapaegln pyglvaprfq rkfkakqltp rileahqnva qlslteaqlr |
| 541 | fiqawqslpd fgisyvmvrf kgsrkdeilg iannrlirid lavgdvvktw rfsnmrqwnv |
| 601 | nwdirqvaie fdehinvafs cvsascrivh eyiggyifls trerargeel dedlflqltg |
| 661 | gheaf |

SEQ ID NO: 180 Human CD37 Transcript Variant 1 cDNA Sequence (NM_001774.2;
CDS: 122-967)

| | |
|---|---|
| 1 | ttcctttctc tctcagctct ccgtctctct ttctctctca gcctctttct ttctccctgt |
| 61 | ctcccccact gtcagcacct cttctgtgtg gtgagtggac cgcttacccc actaggtgaa |
| 121 | gatgtcagcc caggagagct gcctcagcct catcaagtac ttcctcttcg ttttcaacct |
| 181 | cttcttcttc gtcctcggca gcctgatctt ctgcttcggc atctggatcc tcattgacaa |
| 241 | gaccagcttc gtgtcctttg tgggcttggc cttcgtgcct ctgcagatct ggtccaaagt |
| 301 | cctggccatc tcaggaatct tcaccatggg catcgccctc ctgggttgtg tgggggccct |
| 361 | caaggagctc cgctgcctcc tgggcctgta ttttgggatg ctgctgctcc tgtttgccac |
| 421 | acagatcacc ctgggaatcc tcatctccac tcagcgggcc cagctggagc gaagcttgcg |
| 481 | ggacgtcgta gagaaaacca tccaaaagta cggcaccaac cccgaggaga ccgcggccga |
| 541 | ggagagctgg gactatgtgc agttccagct gcgctgctgc ggctggcact acccgcagga |
| 601 | ctggttccaa gtcctcatcc tgagaggtaa cgggtcggag gcgcaccgcg tgccctgctc |
| 661 | ctgctacaac ttgtcggcga ccaacgactc cacaatccta gataaggtga tcttgcccca |
| 721 | gctcagcagg cttggacacc tggcgcggtc cagacacagt gcagacatct gcgctgtccc |
| 781 | tgcagagagc cacatctacc gcgagggctg cgcgcagggc ctccagaagt ggctgcacaa |
| 841 | caaccttatt tccatagtgg gcatttgcct gggcgtcggc ctactcgagc tcgggttcat |
| 901 | gacgctctcg atattcctgt gcagaaacct ggaccacgtc tacaaccggc tcgctcgata |
| 961 | ccgttaggcc ccgccctccc caaagtcccg ccccgccccc gtcacgtgcg ctgggcactt |
| 1021 | ccctgctgcc tgtaaatatt tgtttaatcc ccagttcgcc tggagccctc cgccttcaca |
| 1081 | ttcccctggg gacccacgtg gctgcgtgcc cctgctgctg tcacctctcc cacgggacct |
| 1141 | ggggctttcg tccacagctt cctgtcccca tctgtcggcc taccaccacc cacaagatta |
| 1201 | tttttcaccc aaacctcaaa taaatcccct gcgtttttgg taaaaaaaaa aaaaaaaaaa |
| 1261 | aaa |

SEQ ID NO: 181 Human CD37 Isoform A Amino Acid Sequence (NP_001765.1)

| | |
|---|---|
| 1 | msaqesclsl ikyflfvfnl fffvlgslif cfgiwilidk tsfvsfvgla fvplqiwskv |
| 61 | laisgiftmg iallgcvgal kelrcllgly fgmllllfat qitlgilist qraqlerslr |
| 121 | dvvektiqky gtnpeetaae eswdyvqfqa rccgwhypqd wfqvlilrgn gseahrvpcs |
| 181 | cynlsatnds tildkvilpq lsrlghlars rhsadicavp aeshiyregc aqglqkwlhn |
| 241 | nlisivgicl gvgllelgfm tlsiflcrnl dhvynrlary r |

SEQ ID NO: 182 Human CD37 Transcript Variant 2 cDNA Sequence
(NM_001040031.1; CDS: 292-933)

| | |
|---|---|
| 1 | ttcctttctc tctcagctct ccgtctctct ttctctctca gcctctttct ttctccctgt |
| 61 | ctcccccact gtcagcacct cttctgtgtg gtgagtggac cgcttacccc actaggtgaa |
| 121 | gatgtcagcc caggagagct gcctcagcct catcaagtcc tcggcagcct gatcttctgc |
| 181 | ttcggcatct ggatcctcat tgacaagacc agcttcgtgt cctttgtggg cttggccttc |
| 241 | gtgcctgtgc agatctggtc caaagtcctg gccatctcag gaatcttcac catgggcatc |
| 301 | gccctcctgg gttgtgtggg ggccctcaag gagctccgct gcctcctggg cctgtatttt |
| 361 | gggatgctgc tgctcctgtt tgccacacag atcaccctgg gaatcctcat ctccactcag |
| 421 | cgggcccagc tggagcgaag cttgcgggac gtcgtagaga aaaccatcca aaagtacggc |
| 481 | accaaccccg aggagaccgc ggccgaggag agctgggact atgtgcagtt ccagctgcgc |
| 541 | tgctgcggct ggcactaccc gcaggactgg ttccaagtcc tcatcctgag aggtaacggg |
| 601 | tcggaggcgc accgcgtgcc ctgctcctgc tacaacttgt cggcgaccaa cgactccaca |
| 661 | atcctagsta aggtgatctt gccccagctc agcaggcttg gacacctggc gcggtccaga |
| 721 | cacagtgcag acatctgcgc tgtccctgca gagagccaca tctaccgcga gggctgcgcg |
| 781 | cagggcctcc agaagtggct gcacaacaac cttatttcca tagtgggcat ttgcctgggc |
| 841 | gtcggcctac tcgagctcgg gttcatgacg ctctcgatat tcctgtgcag aaacctggac |
| 901 | cacgtctaca accggctcgc tcgataccgt taggccccgc cctccccaaa gtcccgcccc |
| 961 | gcccccgtca cgtgcgctgg gcacttccct gctgcctgta aatatttgtt taatccccag |
| 1021 | ttcgcctgga gccctccgcc ttcacattcc cctggggacc cacgtggctg cgtgccacctg |
| 1081 | ctgctgtcac ctctcccacg ggacctgggg ctttcgtcca cagcttcctg tccccatctg |
| 1141 | tcggcctacc accacccaca agattatttt tcacccaaac ctcaaataaa tcccctgcgt |
| 1201 | ttttggtaaa aaaaaaaaaa aaaaaaaaa |

SEQ ID NO: 183 Human CD37 Isoform B Amino Acid Sequence (NP_001035120.1)

| | |
|---|---|
| 1 | mgiallgcvg alkelrcllg lyfgmllllf atqitlgili stqraqlers lrdvvektiq |
| 61 | kygtnpeeta aeeswdyvqf qlrccgwhyp qdwfqvlilr gngseahrvp cscynlsatn |
| 121 | dstildkvil pqlsrlghla rsrhsadica vpaeshiyre gcaqglqkwl hnnlisivdi |
| 181 | clgvgllelg fmtlsiflcr nldhyynrla ryr |

SEQ ID NO: 184 Mouse CD37 Transcript Variant 1 cDNA Sequence
(NM_001290802.1; CDS: 97-1008)

| | |
|---|---|
| 1 | tgtctgtgag gttgaactct gcagaaacaa ccttgaagtc ccaggaccca cgtgagtgga |
| 61 | agtccatcag aagcccctgt gcgccctgcc tgagctatgg acacctgcga ggaacccatt |
| 121 | gtgtccctgg cacccacata ttccaaggac cctcaggcga agatgtccgc ccaagagagt |
| 181 | tgcctcagcc tcatcaagta cttcctcttc gttttcaacc tcttcttctt tgtactaggc |
| 241 | ggcctgattt tctgcttcgg cacctggatc ctcattgaca agaccagctt cgtgtccttt |
| 301 | gtgggtttgt ccttcgtgcc actgcagact tggtccaagg tcctggctgt ctcaggtgtc |
| 361 | ctcaccatgg ccctggctct cctgggctgt gtgggggctc taaaggagct gcgctgtctc |
| 421 | ctgggcctgt attttggaat gctgctgctc ctgtttgcca cacagattac cctgggcatc |
| 481 | ctcatttcca ctcagcgggt ccggctggag cgaagggtgc aggaattggt gttgaggacg |
| 541 | atccagagct accgcacgaa tccggctgag acagcagccg aggagagttg ggactatgca |
| 601 | cagttccagc tgcgctgctg cggctggcaa tctccgcggt actggaacaa ggcccagatg |
| 661 | ctgaaagcga acgagtctga ggagcccttt gtgccctgct cctgctacaa ctccacggcg |
| 721 | accaatgact ccaccgtctt tgataagctc tttttctccc agctaagccg gttggggccg |
| 781 | cgggcgaagc tgaggcagac tgctgacata tgtgcactcc ctgcaaaagc tcacatctac |
| 841 | cgtgagggct gcgcgcagag cctccagaag tggctgcaca acaatatcat ctccatagtg |
| 901 | ggaatctgtc tgggagtcgg tcttcttgag ctcggcttca tgacgctctc aatattcctg |
| 961 | tgtagaaatc tggatcacgt ctatgaccgg ctggcccggt accgctaggc cccagcccac |
| 1021 | ccatcggcac ccacgcacct ccatgcagtc aggaaatgtt tccttcctgg ttggtcacag |
| 1081 | gcttggagcc catgcctcag gcctcatccc ctggggaccc agctgtctgc cctatcgaca |
| 1141 | gccttcactt tccccacatg gccagggact tttgtgccca gcttccttcc cttcctggct |
| 1201 | ccctcctccc cacaccatct gtctgccacc tcccacatga cacctcaaat aaatcccctt |
| 1261 | tgggtttttg gcttttt |

SEQ ID NO: 185 Mouse CD37 Isoform 1 Amino Acid Sequence (NP_001277731.1)

| | |
|---|---|
| 1 | mdtceepivs laptvskdpq akmsaqescl slikyflfvf nlfffvlggl ifcfgtwili |
| 61 | dktsfvsfvg isfvplqtws kvlavsgvlt malallgcvg alkelrcllg lyfgmllllf |
| 121 | atqitlgili stqrvrlerr vqelvlrtiq syrtnpdeta aeeswdyaqf qlrccgwqsp |
| 181 | rdwnkaqmlk aneseepfvp cscynstatn dstvfdklff sqlsrlgpra klrqtadica |
| 141 | lpakahiyre gcaqslqkwl hnniisivgi clgvgllelg fmtlsiflcr nldhvydrla |
| 301 | ryr |

SEQ ID NO: 186 Mouse CD37 Transcript Variant 2 cDNA Sequence
(NM_001290804.1; CDS: 97-933)

| | |
|---|---|
| 1 | tgtctgtgag gttgaactct gcagaaacaa ccttgaagtc ccaggaccca cgtgagtgga |
| 61 | agtccatcag aagcccctgt gcgccctgcc tgagctatgg acacctgcga ggaacccatt |
| 121 | gtgtccctgg cacccacata ttccaaggac cctcaggtac taggcggcct gattttctgc |
| 181 | ttcggcacct ggatcctcat tgacaagacc agcttcgtgt cctttgtggg tttgtccttc |
| 241 | gtgccactgc agacttggtc caaggtcctg gctgtctcag gtgtcctcac catggccctg |
| 301 | gctctcctgg gctgtgtggg ggctctaaag gagctgcgct gtctcctggg cctgtatttt |
| 361 | ggaatgctgc tgctcctgtt tgccacacag attaccctgg gcatcctcat ttccactcag |
| 421 | cgggtccggc tggagcgaag ggtgcaggaa ttggtgttga ggacgatcca gagctaccgc |
| 481 | acgaatccgg atgagacagc agccgaggag agttgggact atgcacagtt ccagctgcgc |
| 541 | tgctgcggct ggcaatctcc gcgggactgg aacaaggccc agatgctgaa agcgaacgag |
| 601 | tctgaggagc cctttgtgcc ctgctcctgc tacaactcca cggcgaccaa tgactccacc |
| 661 | gtctttgata agctcttttt ctcccagcta agccggttgg ggccgcgggc gaagctgagg |
| 721 | cagactgctg acatatgtgc actccctgca aaagctcaca tctaccgtga gggctgcgcg |
| 781 | cagagcctcc agaagtggct gcacaacaat atcatctcca tagtgggaat ctgtctggga |
| 841 | gtcggtcttc ttgagctcgg cttcatgacg ctctcaatat tcctgtgtag aaatctggat |
| 901 | cacgtctatg accggctggc ccggtaccgc taggccccag cccacccatc ggcacccacg |
| 961 | cacctccatg cagtcaggaa atgtttcctt cctggttggt cacaggcttg gagcccatgc |
| 1021 | ctcaggcctc atcccctggg gacccagctg tctgccctat cgacagcctt cactttcccc |
| 1081 | acatggccag ggacttttgt gcccagcttc cttcccttcc tggctccctc ctccccacac |
| 1141 | catctgtctg ccacctccca catgacacct caaataaatc ccctttgggt ttttggcttt |
| 1201 | tt |

SEQ ID NO: 187 Mouse CD37 Isoform 2 Amino Acid Sequence (NP_001277733.1)

| | |
|---|---|
| 1 | mdtceepivs laptyskdpq vlgglifcfg twilidktsf vsfvglsfvp lqtwskvlav |
| 61 | sgvltmalal lgcvgalkel rcllglyfgm llllfatqit lgilistqrv rlerrvqelv |
| 121 | lrtiqsyrtn pdetaaeesw dyaqfqlrcc gwgsprdwnk aqmlkanese epfvpcscyn |
| 181 | statndstvf dklffsqlsr lgpraklrqt adicalpaka hiyregcaqs lqkwlhnnii |
| 241 | sivgiclgvg llelgfmtls iflcrnldhv ydrlaryr |

SEQ ID NO: 188 Mouse CD37 Transcript Variant 3 cDNA Sequence (NM_007645.4;
CDS: 12-957)

| | |
|---|---|
| 1 | tttgtgcctc tcagtctctg tctttctttg cccactattc cccttccccc ctgcggccaa |
| 61 | cacctcttct gtctgggttt ctcgagtggg tcattcccca tctaggcgaa gatgtccgcc |
| 121 | caagagagtt gcctcagcct catcaagtac ttcctcttcg ttttcaacct cttcttcttt |
| 181 | gtactaggcg gcctgatttt ctgcttcggc acctggatcc tcattgacaa gaccagcttc |
| 241 | gtgtcctttg tgggtttgtc cttcgtgcca ctgcagactt ggtccaaggt cctggctgtc |
| 301 | tcaggtgtcc tcaccatggc cctggctctc ctgggctgtg tgggggctct aaaggagctg |
| 361 | cgctgtctcc tgggcctgta ttttggaatg ctgctgctcc tgtttgccac acagattacc |
| 421 | ctgggcatcc tcatttccac tcagcgggtc cggctggagc gaagggtgca ggaattggtg |
| 481 | ttgaggacga tccagagcta ccgcacgaat ccggatgaga cagcagccga ggagagttgg |
| 541 | gactatgcac agttccagct gcgctgctgc ggctggcaat ctccgcggga ctggaacaag |
| 601 | gcccagatgc tgaaagcgaa cgagtctgag gagccctttg tgccctgctc ctgctacaac |
| 661 | tccacggcga ccaatgactc caccgtcttt gataagctct ttttctccca gctaagccgg |
| 721 | ttggggccgc gggcgaagct gaggcagact gctgacatat gtgcactccc tgcaaaagct |
| 781 | cacatctacc gtgagggctg cgcgcagagc ctccagaagt ggctgcacaa caatatcatc |
| 841 | tccatagtgg gaatctgtct gggagtcggt cttcttgagc tcggcttcat gacgctctca |
| 901 | atattcctgt gtagaaatct ggatcacgtc tatgaccggc tggcccggta ccgctaggcc |
| 961 | ccagcccacc catcggcacc cacgcacctc catgcagtca ggaaatgttt ccttcctggt |
| 1021 | tggtcacagg cttggagccc atgcctcagg cctcatcccc tggggaccca gctgtctgcc |
| 1081 | ctatcgacag ccttcacttt ccccacatgg ccagggactt ttgtgcccag cttccttccc |
| 1141 | ttcctggctc cctcctcccc acaccatctg tctgccacct cccacatgac acctcaaata |
| 1201 | aatccccttt gggtttttgg cttttt |

SEQ ID NO: 189 Mouse CD37 Isoform 3 Amino Acid Sequence (NP_031671.1)

| | |
|---|---|
| 1 | msaqesclsl ikyflfvfnl fffvlgglif cfgtwilidk tsfvsfvgls fvplqtwskv |
| 61 | lavsgvltma lallgcvgal kelrcllgly fgmllllfat qitlgilist qrvrlerrvq |
| 121 | elvlrtiqsy rtnpdetaae eswdyaqfql rccgwqsprd wnkaqmlkan eseepfvpcs |
| 181 | cynstatnds tvfdklffsq lsrlgprakl rqtadicalp akahiyregc aqslqkwlhn |
| 241 | niisivgicl gvgllelgfm tlsiflcrnl dhvydrlary r |

SEQ ID NO: 190 Human CXorf21 cDNA Sequence (NM_025159.2; CDS: 396-1301)

| | |
|---|---|
| 1 | attctgtggc ttgatgtggc tttgtcagtt actgcctccc cacctcccgg gacttcccac |
| 61 | tgcctcttta gcacaaatcg gacttgaaca aaaacaactc tttttccatg ggaccaatta |
| 121 | taaaaagaat ggctttgcac tgagcagctc agtctactgg tctcatcagt gaaaggcttg |
| 181 | tgaaaatttc tggaaagagc attggctggc ttgttcatct ctctgtttgg tcagttgctg |
| 241 | tgtttctgcc ggatcagatg agcagattgg ttagtgaagg tcagtgtgag aagaagattg |
| 301 | tttctgagct tgagaagctt ctggaggatt gaagagtatt tgaagtctgt gtcaaacatc |
| 361 | catatcataa gtggaatttt ggagatattc aaagaatgct gtcagaaggg tatctcagtg |
| 421 | gacttgagta ctggaatgac atccactgga gttgtgcctc ttataatgag caggtggctg |
| 481 | gggaaaagga agaggagaca aattctgttg ctaccctttc ctattcctct gtggatgaaa |
| 541 | cacaagtcag aagtctctac gtgagctgca aatcatctgg caagtttatc tcttcagtgc |
| 601 | attcaagaga gagccaacat agcagaagtc agagagtcac agtgctgcag acaaacccca |
| 661 | atcctgtgtt tgaaagccca aacttggctg cagttgaaat atgtagagat gccagcagag |
| 721 | agacctactt ggttccatct tcttgcaaaa gtatttgcaa gaattataat gacttacaga |
| 781 | ttgcaggggg ccaggtgatg gccattaatt cagtgacaac agattttccc tctgagagca |
| 841 | gttttgaata tggccctttg ctgaagtcat ctgagattcc tttacccatg gaggattcca |
| 901 | tttctactca gcccagtgac tttccccaaa aacctatcca gcggtactca tcctattgga |
| 961 | gaataacaag catcaaagag aaaagcagct tgcaaatgca gaatcctatt tctaatgcag |
| 1021 | ttctgaatga gtacctggag cagaaggttg tggagttata taaacagtac attatggaca |
| 1081 | ccgtgtttca tgacagttct cctacccaga ttctggcgtc tgaactcatc atgacaagtg |
| 1141 | tagaccaaat cagtcttcaa gtgtctagag agaagaatct ggagacctca aaagccagag |
| 1201 | atatagtctt tagccgccta ttgcaattga tgtcaactga aattactgaa attagcactc |
| 1261 | ctagtctcca tatttctcag tatagcaatg taaatccata gagaggatgc ttccattact |
| 1321 | gtctcgcatt tacttaaaca tgaagcaaca ctttatccat ttattctgag aatgtgcagg |
| 1381 | aggggttagt gaaggggaat taagggctag agaagtaaag atcagctgga agtcatgtgt |
| 1441 | gaatcatgga gaaatctcat aatattacac ttgatgaagg aatatggtaa gaggagccat |
| 1501 | aaggaatgat ttcaaagaga ggtgtgtaca gcaaggaagc aaaaataaaa atgatcaaaa |
| 1561 | aagaaacggt taattcattt gaagaaacat aggaattaaa aaagaagaca gtcaaatgag |
| 1621 | atgaaacaaa aaggccaaaa ggtggccggg tgtagtggct cacgcctgta atcccagcat |
| 1681 | ttcggaggct gatgtgggtg gattacctga cgtcaggaat tcgagaccgg cctggccaat |
| 1741 | atggtgaaac cccatctcta ctaaaaatac aaaaaattag ctggacatgg tggtgggtac |
| 1801 | ctgtaatccc agctactagg gaggctgagg caggagaatc tcttgaacct gagaggcaga |
| 1861 | ggttgcagtg agccgaggtc gctccattgc actccagcct gggcaacaag agtgagactc |
| 1921 | ccgtctc |

SEQ ID NO: 191 Human CXorf21 Amino Acid Sequence (NP_079435.1)

| | |
|---|---|
| 1 | mlsegylsgl eywndihwsc asyneqvage keeetnsvat lsyssvdetq vrslyvscks |
| 61 | sgkfissvhs resqhsrsqr vtvlqtnpnp vfespnlaav eicrdasret ylvpsscksi |
| 121 | cknyndlqia ggqvmainsv ttdfpsessf eygpllksse iplpmedsis tqpsdfpqkp |
| 181 | iqryssywri tsikeksslq mqnpisnavl neyleqkvve lykqyimdtv fhdssptqil |
| 241 | aselimtsvd qislqvsrek nletskardi vfsrllqlms teiteistps lhisqysnvn |
| 301 | p |

SEQ ID NO: 192 Mouse CXorf21 cDNA Sequence (NM_001163539.1; CDS: 166-
1062)

| | |
|---|---|
| 1 | ctcttgttcc ataggatcag tgatactaag aagggggcag atcttagtag cctcttcagt |
| 61 | gagagacttg agagcttttt gaaaagagcc ctgtctggct agttcttctc tattagatca |
| 121 | gtcattgtgt tgctgcagga tccaaggagc agactccggt gaagaatgct atcagaagga |
| 181 | tatctcagtg gacttaccta ctggaatgac attcattgga attgtgcatc ttataatgaa |
| 241 | ccggtggctg gggaccaagg caaagagaca agttctgttg ctgctctttc atattcctct |
| 301 | gtggatgaaa cacaagttca aagtctttat gtgagctgca aatcctctgg gaagtttatt |
| 361 | tcatcagtgc atgcaagggc gagtcagcac agcagaagcc agagcagaac agtgctgcag |
| 421 | gcaaacagca accctgtatt tgaaagtcca actttagctg cagttggtat atgcagagat |
| 481 | gtgatcaggg agacctactt ggttccacct tcttgtaaaa gtatttgcaa aaattacaac |
| 541 | gacttacata ttgcaggggg acaggtgatg gccattaact cagtaatggc aaatttcccc |
| 601 | tctgagagca gctttgaaga tggtcctttg ctaaagtcat ctgagatttc tttgtccatg |
| 661 | gaggattcca cttccactca gctcactgaa cttcccctca aacctatcca gcggtactca |
| 721 | tcctactgga ggataaccag catcaaagag aaaagcagcc tgcaaatgca gaagcctatt |
| 781 | tcaaatgcag tgctcaatga gtacctggag cagaaggtgg tggaattgta taagcaatat |
| 841 | attatggaca ctgtgtttca tgacagttct cctacccaga ttctggcatc agaattcatc |
| 901 | atgacgaatg tagatcaaat tagtcttcaa gtgtctaaag agaagaacct ggacacttca |
| 961 | aaagtcaagg acatagttat tagccacctg ttgcagttgg tatcatctga gatcagcacc |
| 1021 | cctagtcttc atatttctca gtatagcaat ataactccat agagaaggct cctgtcaatt |
| 1081 | ccccttattc ctatgaatcc caaggcacta ttgtattaat ttgatcagag gatgtgatgg |
| 1141 | agggaattct ggaagggaat taacaactag taaaggacac tttgagaaat cacatatgga |
| 1201 | aaggaacagg aagaggaacc aaaagaatgg tttcaaggac aagtttatac agaatcagag |
| 1261 | caaaattaaa aatgatcaca gagagaagga aggtactgtg attcaatttt aggagttctg |
| 1321 | aaactggaag ttaagccaaa tcaggaacaa aaggaaacac tatggcaaac tagaaagtcg |
| 1381 | atggatttga gaattgggaa ttaaacacct gtttcctatt tagatacatt tatctaggtt |
| 1441 | gtttcttctg gaaagaaatg gactacaaga tggttgttaa attcaggtgg actgacattt |
| 1501 | ttccaagtat aagcttgtat ttcttttcct ctgtgctata tcagtaagtc atgtagatat |
| 1561 | actctttata aatattaaat gaatgacaaa caaatctcag ttgtttaaac attttttttt |
| 1621 | tttgcaacaa ggctctatta gctcaggctg gttttacaat ccttacatag ccgatgatct |
| 1681 | tgaattcctt attctcttgc ttctatccca caagtgctgg tattataggt atgtatcatc |
| 1741 | aaatctggat gtgtttttat ttgaaatgaa aaggttcagc cacaagacta tgacttaaat |
| 1801 | ctcctaattc tatttagtga tagagatagc agtgtttcaa cggaaaacct cctattgtga |
| 1861 | acattgaagc attttatttc actgagtgtg attttcatgg tgctatgagg ttcaaaagga |
| 1921 | ttatgaatac tttgcccccc atttcccttt ttcatgtgtt cttctgacct ggagccagaa |
| 1981 | aagggtcttc tgattgttct atacaagacc aaggactcca taatttcaat ttctgtatat |
| 2041 | ttgtttacta aaacagtagc tttacatgtg tattactgtc ttgatctttt attcagctca |
| 2101 | ggacttagaa aactatgagc ctttggtcaa atctaacttt atgatagctt tggactctcg |
| 2161 | tgagctaagg ataggttttc cttttctctt ttcttttttc cctttctttt ccttttttcc |
| 2221 | ttttcttttt cttgagggag ggcctcttta ttgtatagct ccagctgtct ggaactccct |
| 2281 | atgtagacca ggctggtgtc taacacacag agatttgtct gcctgtgctt cccacatgct |
| 2341 | aggaggatta agggcatgtg ccattatatc acacttggca tgttttatta tttttaattt |
| 2401 | taatatattt taaaagccca aaagcttaag ttaaaaatac tttagagcat atgaaaatta |
| 2461 | tatgaaattt aaaattgaaa ttcagtgtat ataaactaga ctttatttgt ttatttattt |
| 2521 | atttatttat ttattggcag tgctggtgat ggaattcaag gccttattca tgacaggcaa |
| 2581 | gttctataac atattccatg ctgcctacta aattttattt gtttgtttat attttatata |
| 2641 | gtttgtagtt gcttttacat aagaatggtc gaacagacat gacggagaac atatgacaca |
| 2701 | acaaagctta atatttcttt ttaccatctg gctgtttaca gtgatgtttg ccaactctgt |
| 2761 | tcaatgacag tgtcttgccc aaacttgatt taggttttcc aggaagcaga ctttcgaaag |
| 2821 | gacattgggg agcattttta tccttatggg gaataggttc cctctgtgat ggaatgaggg |
| 2881 | aagcaaatcc agatgttacc agaaagagtt agggtgaatc ttcaaaatag ttccaaattg |
| 2941 | aaacaagtga gtaggcgtct gttctcaagc gtctaagtgc aaggtgcata ccttgactga |
| 3001 | tggccacagg tctatggagt ggagtggagt ggagtggagt ggagtggagt gaatagctgc |
| 3061 | agcctctggt caggagcctg gtgtctagga gcatggaaaa aggcctacca ttccagtgca |
| 3121 | ggctaaggtc acctgctggg ttaccggggt tttaaaccta gctcaaccag aaaccaggct |
| 3181 | gcctctcata gtcccacaac taatgaccca aagtccatta catccacacc cagccaaatt |
| 3241 | ttctactatc attcttgaaa ttatgtgagg ttctataact gtacataaat aaataaataa |
| 3301 | aagcactgca gaaatctgaa atggctttag taaaattttc tgccacaatg ggactacaac |
| 3361 | agtttagatt cagaaattca gtcttccttt ttttcttttt aaaaaatttt attgggttca |
| 3421 | ttgattctac caagactagt ctgcacaggg gagagtgtgt cactctatga aagactaata |
| 3481 | tttcctaaaa ttgtgaggca gagaaaattc tttccttaag ttgcttctgt gtggtgtttg |
| 3541 | ttatggcaat aagaaattaa tcgagccatc ttagttccca gatccctctg agactatctg |
| 3601 | cacaggtgag agtatggact acagaagcta acagcttccg ggacagaccc tgtttcaggt |
| 3661 | tctcatcttc tgccaggagg cagatctgat tgccagatat ctgtgaacct ttcctgcaag |
| 3721 | aggagagctt gcatgcagtg agtgctctga ccactgaaac tcagaagaga gctagtcccc |
| 3781 | caggtctgct gatagagcgt aacagaatca cctgaggaac aagctctaac cagag |

SEQ ID NO: 193 Mouse CXorf21 Amino Acid Sequence (NP_001157011.1)

| | |
|---|---|
| 1 | mlsegylsgl tvwndihwnc asynepvagd qgketssvaa lsyssvdetq vqslyvscks |
| 61 | sgkfissvha rasqhsrsqs rtvlqansnp vfesptlaav gicrdviret ylvppscksi |
| 121 | ckhyndlhia ggqvmainsv manfpsessf edgpllksse islsmedsts tqltelplkp |
| 181 | iqryssywri tsikeksslq mqkpisnavl neyleqkvve lykqyimdtv fhdssptqil |
| 241 | asefimtnvd qislqvskek nldtskvkdi vishllqlvs seistpslhi sqvsnitp |

SEQ ID NO: 194 Human CD48 Transcript Variant 1 cDNA Sequence (NM_001778.3;
CDS: 89-820)

| | |
|---|---|
| 1 | gtttggtaag ttccgttttt agccccggcc tttttctagc caggctctca actgtctcct |
| 61 | gcgttgctgg gaagttctgg aaggaagcat gtgctccaga ggttgggatt cgtgtctggc |
| 121 | tctggaattg ctactgctgc ctctgLcact cctggtgacc agcattcaag gtcacttggt |
| 181 | acatatgacc gtggtctccg gcagcaacgt gactctgaac atctctgaga gcctgcctga |
| 241 | gaactacaaa caactaacct ggttttatac tttcgaccag aagattgtag aatgggattc |
| 301 | cagaaaatct aagtactttg aatccaaatt taaaggcagg gtcagacttg atcctcagag |
| 361 | tggcgcactg tacatctcta aggtccagaa agaggacaac agcacctaca tcatgagggt |
| 421 | gttgaaaaag actgggaatg agcaagaatg gaagatcaag ctgcaagtgc ttgaccctgt |
| 481 | acccaagcct gtcatcaaaa ttgagaagat agaagacatg gatgacaact gttatctgaa |
| 541 | actgtcatgt gtgatacctg gcgagtctgt aaactacacc tggtatgggg acaaaaggcc |
| 601 | cttcccaaag gagctccaga acagtgtgct tgcaaccacc cttatgccac ataattactc |
| 661 | caggtgttat acttgccaag tcagcaattc tgtgagcagc aagaatggca cggtctgcct |
| 721 | cagtccaccc tgtaccctgg cccggtcctt tggagtagaa tggattgcaa gttggctagt |
| 781 | ggtcacggtg cccaccattc ttggcctgtt acttacctga gatgagctct tttaactcaa |
| 841 | gcgaaacttc aaggccagaa gatcttgcct gttggtgatc atgctcctca ccaggacaga |
| 901 | gactgtatag gctgaccaga agcatgctgc tgaattatca acgaggattt tcaagttaac |
| 961 | ttttaaatac tggttattat ttaattttat atccctttgt tgttttctag tacacagagc |
| 1021 | tatagagata cacatgcttt tttcccaccc aaaattgtga caacattatg tgaatgtttt |
| 1081 | attatttttt aaaataaaca tttgatataa ttgtcaatta actgaaaaaa aaaaaaaaaa |
| 1141 | aaaaaaaaaa aaaaa |

SEQ ID No: 195 Human CD48 Isoform 1 Amino Acid Sequence (NP_001769.2)

| | |
|---|---|
| 1 | mcsrgwdecl alellllpls llvtsiqghl vhmtvvsgsn vtlniseslp enykqltwfy |
| 61 | tfdqkivewd srkskyfesk fkgrvrldpq sgalyiskvq kednstyimr vlkktgneqe |
| 121 | wkiklqvldp vpkpvikiek iedmddncyl klscvipges vnytwygdkr pfpkelqnsv |
| 181 | lettlmphny srcytcqvsn svsskngtvc lsppctlars fgvewiaswl vvtvptilgl |
| 241 | llt |

SEQ ID NO: 196 Human CD48 Transcript Variant 2 cDNA Sequence
(NM_001256030.1; CDS: 89-847)

| | |
|---|---|
| 1 | gtttggtaag ttccgttttt agccccggcc tttttctagc caggctctca actgtctcct |
| 61 | gcgttgctgg gaagttctgg aaggaagcat gtgctccaga ggttgggatt cgtgtctggc |
| 121 | tctggaattg ctactgctgc ctctgtcact cctggtgacc agcattcaag gtcacttggt |
| 181 | acatatgacc gtggtctccg gcagcaacgt gactctgaac atctctgaga gcctgcctga |
| 241 | gaactacaaa caactaacct ggttttatac tttcgaccag aagattgtag aatgggattc |
| 301 | cagaaaatct aagtactttg aatccaaatt taaaggcagg gtcagacttg atcctcagag |
| 361 | tggcgcactg tacatctcta aggtccagaa agaggacaac agcacctaca tcatgagggt |
| 421 | gttgaaaaag actgggaatg agcaagaatg gaagatcaag ctgcaagtgc ttgaccctgt |
| 481 | acccaagcct gtcatcaaaa ttgagaagat agaagacatg gatgacaact gttatctgaa |
| 541 | actgtcatgt gtgatacctg gcgagtctgt aaactacacc tggtatgggg acaaaaggcc |
| 601 | cttcccaaag gagctccaga acagtgtgct tgaaaccacc cttatgccac ataattactc |
| 661 | caggtgttat acttgccaag tcagcaattc tgtgagcagc aagaatggca cggtctgcct |
| 721 | cagtccaccc tgtaccctgg gtaagaagga tccctgggag ctgagggggg cacagggtaa |
| 781 | ctggagttgt tttgaacaaa gaaaggctgg gggtcctatt cagcctcctt gcacagtgtg |
| 841 | gtggtgaatc cctaaggtgt ctgggagagc tgggagacgt gggttctgcc accagctcta |
| 901 | ccaccacctc ccagccagct tacctcaact tcgtgggggc tcagtgttct cacctgcaaa |
| 961 | ggacgtttgg gagagatctc tgatactcct cttccctctc ccgctctaac aaagcatagt |
| 1021 | cctaacatct gaggccaggg tcatcataga gtagactgaa acatcagggt gagcagggag |
| 1081 | aaggaagggc aagtgggcga gcagctgtct agaggggctt cattagacag ccgaagtcag |
| 1141 | ccaaggaaag agggaccgag gtcattagac cgccaaagtc agccagggaa agagggactg |
| 1201 | aggagacggg cctgagagag gccgtcgagg aggcgtgaga gcctgagcct caggcgaagc |
| 1261 | ttctcctccc cagcctgatg ttcctagatg aacttaggaa gccagattcc cctgtctcct |
| 1321 | gggaggatcc actcatgagt gtcacacctg gctctagatc aggcctacac tggtgctagc |
| 1381 | atgggacagc taaggccatg ggttttagag tcagtcatac ctggggtcac ttctaggact |
| 1441 | gtcacttact agctaaacaa gttacttagc ttccccaagt catgttcttc ctaaataaag |
| 1501 | gacaaaataa cagttcctat aaaaaaaaaa aaaaaaa |

SEQ ID NO: 197 Human CD48 Isoform 2 Amino Acid Sequence (NP_001242959.1)

| | |
|---|---|
| 1 | mcsrgwdscl alellllpls llvtsiqghi vhmtvvsgsn vtlniseslp enykqltwfy |
| 61 | tfdqkivewd srkskyfesk fkgrvrldpq sgalyiskvq kednstyimr vlkktgnege |
| 121 | wkiklqvldp vpkpvikiek iedmddncyl klscvipges vnytwygdkr pfpkelqnsv |
| 181 | lettlmphny srcytcqvsn svsskhgtvc lsppctlgkk dpwelrgaqg nwscfeqrka |
| 241 | ggpiqppctv ww |

SEQ ID NO: 198 Mouse CD48 Transcript Variant 1 cDNA Sequence (NM_007649.5;
CDS: 103-825)

| | |
|---|---|
| 1 | atacgacttc cggttttggg ttttgcttcc tgattgaagg gcaggcgccc tgacttctct |
| 61 | tacagttgtc tccagtgttc tggggaagct tctctaagta ttatgtgctt cataaaacag |
| 121 | ggatggtgtc tggtcctgga actgctactg ctgcccttgg gaactggatt tcaaggtcat |
| 181 | tcaataccag atataaatgc caccaccggc agcaatgtaa ccctgaaaat ccataaggac |
| 241 | ccacttggac catataaacg tatcacctgg cttcatacta aaaatcagaa gattttagag |
| 301 | tacaactata atagtacaaa gacaatcttc gagtctgaat ttaaaggcag ggtttatctt |
| 361 | gaagaaaaca atggtgcact tcatatctct aatgtccgga aagaggacaa aggtacctac |
| 421 | tacatgagag tgctgcgtga aactgagaac gagttgaaga taaccctgga agtatttgat |
| 481 | cctgtgccca agccttccat agaaatcaat aagactgaag cgtcgactga ttcctgtcac |
| 541 | ctgaggctat cgtgtgaggt aaaggaccag catgttgact atacttggta tgagagctcg |
| 601 | ggacctttcc ccaaaaagag tccaggatat gtgctcgatc tcatcgtcac accacagaac |
| 661 | aagtctacat tttacacctg ccaagtcagc aatcctgtaa gcagcaagaa cgacacagtg |
| 721 | tacttcactc taccttgtga tctagccaga tcttctggag tatgttggac tgcaacttgg |
| 781 | ctagtggtca caacactcat cattcacagg atcctgttaa cctgacaaga actcttctca |
| 841 | cccaagaagg caacttggaa gcacagagtc ttgccttcat ccctagcagt gttcctagcc |
| 901 | agcgaagcaa ctctggctct attggacaaa ggaaaatgtg ttactgaacg tctgcgagag |
| 961 | tttgcatgca tgctctatga aacaagcaca ggaccttgta cagtgctcca ccactgacct |
| 1021 | gtgtgcccag tcctttacaa agatttcaaa tcaacctttt aaaaactgtg cataatatct |
| 1081 | aattttatat accctagttg tttcccaaca tatattaaag ataaatgcat tctttttacc |
| 1141 | aaaatgtgac tatattattt tcatgttttc atatctcttt ttaaaataaa ttcttttaaa |
| 1201 | aaact |

SEQ ID NO: 199 Mouse CD48 Isoform 1 Amino Acid Sequence (NP_031675.1)

| | |
|---|---|
| 1 | mcfikqgwcl vlellllplg tgfqghsipd inattgsnvt lkihkdplgp ykritwlhtk |
| 61 | nqkileynyn stktifesef kgrvyleenn galhisnvrk edkgtyymrv lretenelki |
| 121 | tlevfdpvpk psieinktea stdschlrls cevkdqhvdy twyessgpfp kkspgyvldl |
| 181 | ivtpqnkstf ytcqvsnpvs skndtvyftl pcdlarssgv cwtatwlvvt tliihrillt |

SEQ ID NO: 200 Mouse CD48 Transcript Variant 2 cDNA Sequence
(NM_001360767.1; CDS: 103-558)

| | |
|---|---|
| 1 | atacgacttc cggttttggg ttttgcttcc tgattccagg gcaggcgccc tgacttctct |
| 61 | tacagttgtc tccagtgttc tggggaagct tctctaagta ttatgtgctt cataaaacag |
| 121 | ggatggtgtc tggtcctgga actgctactg ctgcccttgg gaactggatt tcaaggtcat |
| 181 | tcaataccag atataaatgc caccaccggc agcaatgtaa ccctgaaaat ccataaggac |
| 241 | ccacttggac catataaacg tatcacctgg cttcatacta aaaatcagaa gattttagag |
| 301 | tacaactata atagtacaaa gacaatcttc gagtctgaat ttaaaggcag ggtttatctt |
| 361 | gaagaaaaca atggtgcact tcatatctct aatgtccgga aagaggacaa aggtacctac |
| 421 | tacatgagag tgctgcgtga aactgagaac gagttgaaga taaccctgga agtatttgcc |
| 481 | agatcttctg gagtatgttg gactgcaact tggctagtgg tcacaacact catcattcac |
| 541 | aggatcctgt taacctgaca agaactcttc tcacccaaga aggcaacttg ccagcacaga |
| 601 | gtcttgcctt catccctagc agtgttccta gccagcgaag caactctggc tctattggac |
| 661 | aaaggaaaat gtgttactga acgtctgcga gagtttgcat gcatgctcta tgaaacaagc |
| 721 | acaggacctt gtacagtgct ccaccactga cctgtgtgcc cagtccttta caaagatttc |
| 781 | aaatcaacct tttaaaaact gtgcataata tctaatttta tataccctag ttgtttccca |
| 841 | acatatatta aagataaatg cattcttttt accaaaatgt gactatatta ttttcatgtt |
| 901 | ttcatatctc tttttaaaat aaattctttt aaaaaact |

SEQ ID NO: 201 Mouse CD48 Isoform 2 Amino Acid Sequence (NP_001347696.1)

| | |
|---|---|
| 1 | mcfikqgwcl vlellllplg tgfqghsipd inattgsnvt lkihkdplgp ykritwlhtk |
| 61 | nqkileynyn stktifesef kgrvyleenn galhisnvrk edkgtyymrv lretenelki |
| 121 | tlevfarssg vcwtatwlvv ttliihrill t |

SEQ ID NO: 202 Human CD84 Transcript Variant 1 cDNA Sequence
(NM_001184879.1; CDS: 80-1117)

| | |
|---|---|
| 1 | ggaggaagaa aactcaagtg aaactgactc tgctagaaca gtgccgtgct tttccacaga |
| 61 | aggttagacc ctgaaagaga tggctcagca ccacctatgg atcttgctcc tttgcctgca |
| 121 | aacctggccg gaagcagctg gaaaagactc agaaatcttc acagtgaatg ggattctggg |
| 181 | agagtcagtc actttccctg taaatattca agaaccacgg caagttaaaa tcattgcttg |
| 241 | gacttctaaa acatctgttg cttatgtaac accaggagac tcagaaacag cacccgtagt |
| 301 | tactgtgacc cacagaaatt attatgaacg gatacatgcc ttaggtccga actacaatct |
| 361 | ggtcattagc gatctgagga tggaagacgc aggagactac aaagcagaca taaatacaca |
| 421 | ggctgatccc tacaccacca ccaagcgcta caacctgcaa atctatcgtc ggcttgggaa |
| 481 | accaaaaatt acacagagtt taatggcatc tgtgaacagc acctgtaatg tcacactgac |
| 541 | atgctctgta gagaaagaag aaaagaatgt gacatacaat tggagtcccc tgggagaaga |
| 601 | gggtaatgtc cttcaaatct tccagactcc tgaggaccaa gagctgactt acacgtgtac |
| 661 | agcccagaac cctgtcagca acaattctga ctccatctct gcccggcagc tctgtgcaga |
| 721 | catcgcaatg ggcttccgta ctcaccacac cgggttgctg agcgtgctgg ctatgttctt |
| 781 | tctgcttgtt ctcattctgt cttcagtgtt tttgttccgt ttgttcaaga gaagacaagg |
| 841 | taggattttc ccagaaggtt cctgcttgaa caccttcact aagaaccctt atgctgcctc |
| 901 | aaagaaaacc atatacacat atatcatggc ttcaaggaac acccagccag cagagtccag |
| 961 | aatctatgat gaaatcctgc agtccaaggt gcttccctcc aaggaagagc cagtgaacac |
| 1021 | agtttattcc gaagtgcagt ttgctgataa gatggggaaa gccagcacac aggacagtaa |
| 1081 | acctcctggg acttcaagct atgaaattgt gatctaggct gctgggctga attctccctc |
| 1141 | tggaaactga gttacaacca ccaatactgg caggttccct ggatccagat cttctctgcc |
| 1201 | caactcttac tgggagattg caaactgcca catctcagcc tgtaagcaaa gcaggaaacc |
| 1261 | ttctgctggg catagcttgt gcctaaatgg acaaatggat gcataccctt cctgaaatga |
| 1321 | ctcccttctg aatgaatgac aaagcaggtt acctagtata gttttcccaa acttcttccc |
| 1381 | atcatagcac atgtagaaaa taatattttt atggcacact gggataaaca agcaagattg |
| 1441 | ctcacttctg gaagctgcat atgactagag gcctcttgtg actggaggta acaaccctgc |
| 1501 | ccagtaactg tgggagaagg ggatcaatat tttgcacacc tgtaataggc catggcacac |
| 1561 | cagccaagat gctctgctca cagtcagtat gtgtgaagat ccctggtgcg tggccttcac |
| 1621 | cacgcatctt gagcaaatta ggaaaatgta cccttcgctt gaggcagatg cagcccttcc |
| 1681 | cccgagtgca tggcttggag agcagaatgt gggctgcata taagcacact catccctttg |
| 1741 | tctgggaatc tttgtgcagg gcataacagg cttagtaagt ccaaacacag atgacagtgc |
| 1801 | tgtgtgggtc tctgtcagag ttgtggctct cagccatgta gacacactct ccaaatggag |
| 1861 | tgttggaaaa tgttctttct gcagggtcta gagactgctg ggacactttt cttggagtgc |
| 1921 | tacttcagaa gccttatagg attttctttc tggccaagat ttccttctgt atcactccaa |
| 1981 | gcagcctcag cagaagaagc agccatgccc agtattccca ctctccaaaa ggaactgacc |
| 2041 | agcttatatt tctcacactt ctggggaact gggtataatc caaccatcaa aatagaagac |
| 2101 | cttgcaagaa gcagagtcat tctccagaag gaacttggga gatgatggtg cagatgatga |
| 2161 | aactgggttc atcccagttc caaagactca gagaactaga gtttaagctg aggcagagtg |
| 2221 | ccgccaccct ggcatgcccc acaaacagat caccagccag cttacacagg cattaactct |
| 2281 | cctcaatgag gaagaatcat tcacaactga gcaagacatt catatgatca tttaaggaag |
| 2341 | tgtttccctt atgtgttagc aagtataatc ggctaactcc taaatcccaa tgaatagtcc |
| 2401 | taggctggac agcaatgggc tgcaattagg cagataaaga catcagtccc agtaaatgaa |
| 2461 | tccatagact catctagcac caactaccat tagcactatg ttaggagctg caaggcccca |
| 2521 | aagtagaaga tgtgcataat gtctgctctt gtgtagctca ggagacaatt ccagcacaga |
| 2581 | cactacagtt aacgctgaac tgcagctgca agtaatagca tgaacagtca gaaaaatacc |
| 2641 | ttatgagggg gcagggctga agctgggcct tgaaggatgg atgaaatttg gatagagaat |
| 2701 | gaggaagaca gagggcctcc aagtgagaga agcatgaaaa atgagcaggg gcctggatca |
| 2761 | gtggggtgta ttcagagcac ctactccaga gcaccatgca tgctcacagt cccttgccta |
| 2821 | tgtgtggcag agtgtcccag ccagatgtgt gccctcaccc catgtccatt tacatgtcct |
| 2881 | tcaatgccca cctcaaaagg tacctcttct gtaaagcttt ccctggtatc aggaatcaaa |
| 2941 | attaatcagg gatcttttca cactgctgtt ttttcctctt tggtccttct atcactaaaa |
| 3001 | ctcatctcat tcagccttac agcataacta attatttgtt ttcctcacta cattgtacat |
| 3061 | gtgggaatta cagataaacg gaagccggct ggggtggtgg ctcacgcctg taatcccaac |
| 3121 | actttgggag gccaaggcag gcggatcacc tgaggtcagg agttcgagat tagtctggcc |
| 3181 | aacatggtga aaccccatct ctactaaaaa tacgaaatta gccaggtgtg gtggcacaca |
| 3241 | tctgtagtcc cagctactct ggaggctgag acaggagaat cgcttgaacc caggaagtgg |
| 3301 | aggttgcagt gagctgagat cacaccactg cactccagcc tgggagagac agagtgagac |
| 3361 | tccatctcga aaaaaaaaaa aagatagaag ccaataagca tggtgcaatc aaattctggc |
| 3421 | aagcattaaa tatcaggatg cagctgggca cggtggctca cgcctgtaat cccagcactt |
| 3481 | tgggaggcca aggtgggcgg atcacttgag gtcaggaatt tgagaggatc ctggccagca |
| 3541 | tggcaaaacc ccatctgtac ttaaaataca aaaaaattag ctgggcgtgg tggtgcacac |
| 3601 | ctgtaatccc agctacttgg gaggctgagg tgggagaatt gcttgaacct gggaggtgga |
| 3661 | ggttgcagtg agctgagatc ctgccactgc actccaggct gggcaacaga gtgagaccat |
| 3721 | gtctcaaaaa ataaaaataa aataaaataa tatcaggatg catacatcag aggctgttcc |
| 3781 | tagtgtaaag gcactttgga gggagaagac tttcagagtt aggcagacca actaagaggt |
| 3841 | cagctgaagc acctaaccag ttgtaaggag gtgaaagaca gcaccccaag aagagacgtg |
| 3901 | caggaaggag gaaagaggct tggtcataaa ggatggagga attccaaagt gacactgaac |
| 3961 | aggctgcgtt tatcctaaaa taaaaccact cctcactctg tggatgcgtt gaagactcat |
| 4021 | tcccaaacat ctttattctc taacttgccc tcttcctctt cctaatatgc tcactcaagt |
| 4081 | aaaattacta gtgtcctaat gcccctatgc atattgtcaa aaataaaaat cagaagcagg |
| 4141 | ttagatctgt taggtcttcc agaagagcaa acctgggatg aagccagagc ccaggaattc |
| 4201 | tgaaggtagc ctttggactc aggacaccct actcttgtct ctcctctcag tttctctgct |
| 4261 | atgaatctcc tgattcatga acacgttatc tgttcaccct tctctctagg tcttagttct |
| 4321 | tagattttcc ttctgtaaaa tgcatgtgat cttattttcc cctccacaac tttccagatg |
| 4381 | aactagactg tgaccaagag gtctataaaa tcaaagcatc atggaacagg atcttgtatc |
| 4441 | agaccaaagt gtgccagttt ttaaaaatgt gcatcaaaat ggaagtctca gagacagagc |
| 4501 | cctctggtgg aaagttctag taggttagga cagtcctgcc tgcagacacc ttgggcttta |
| 4561 | ctgagggact caactgagaa aatgaggaat gttgcagctc atgattctta gaagaagaaa |
| 4621 | gtgaagcttg tttaaaatat gatttaaaaa atctgtagaa cactgtaaac tacacaggct |
| 4681 | atgagggaat agcctggttg ggccagcttg gaaatcgggc acaggcagga aggggcctgt |
| 4741 | ctggtttggg ccgtgtccac agagagcact tcttaggtcc tgcctggaga gaaggaatgg |
| 4801 | ctgggctata ttttcttcca gactcattat ttttcttctg tttgactttt ctctgaattt |
| 4861 | cccttgattt gtataaattt tctcaataat tagtgacagt gtctactgat tgtaaaatga |
| 4921 | agcttgaagg ccaggcgcag tggctcatgc ctgtaatcct agaattttgg gaggccaagg |
| 4981 | tgggtggatc acaaggagtt cgagaccagc ctggccaagg ttgtgaaacc gcgtctctac |
| 5041 | taaaaataca aaaaaattag grgggcatgg tggcacgtgc ctgtagtccc agctactcag |
| 5101 | gaagctgagg caacagaatc acttgaacct gggaggtgga ggttgcagtg agccgagatc |
| 5161 | acgccactgc actccagcct gggcgagaga gtgagactcc gcctcaaaaa aaaaaaaaaa |
| 5221 | aaaaaaagtt tgaagaacaa agacaataag aggaaatata atgagtggtc ataaatgtgg |
| 5281 | gctctgacag tagagtgcct gggtctgcat cctggtttct tagtcatgtg accttaggca |
| 5341 | agttacttta acctcgctgt acctcaggtt gtccatctgt aaaatgggga taataatagt |
| 5401 | gcctaccttt taaggttgat gtggggatta aatgaggtgt tgctcataca ggaatgtgcc |
| 5461 | tgtgcatggc aaagttcggg aaatttttta taagctgttc taggcctgaa atcttcagaa |
| 5521 | gatgctaatc taaattcatg aaataagctt cttacaacag aaatgctgct agtattatgc |
| 5581 | aaaattaatg ttgtatatca aacttttaac tctcatccct ccttattcag atatattttg |
| 5641 | ttataagcaa tgtttgttcc cctcgttatt ataccacagt ctacttacct gatgctatat |
| 5701 | ctgcctcccc agttagactg agagaacagg ggatatacct aaataataat aataataata |
| 5761 | ataataataa ataataatgg agagctcctt gaagataggg agcctgtaag aatcattgag |
| 5821 | ggcttatttt gtataccaac tgctaaacta gatgcttcat acattgttgt caatactcat |
| 5881 | gacagccttg taaagtagaa attaattctt ccagttaaca ctaaggctga catatgaata |
| 5941 | ccttggcaaa tctggaaagc tgggaagaca gtatttgaat tcaagacttc ttgtcaccaa |
| 6001 | gggccatgca cttgtactct gccatgtggc ccttttttac ctcctgtgga ttctccctac |
| 6061 | ctggtacttg gccttaggtg tacacacacc tggcactttg cttgacacat aataggtgga |
| 6121 | ccacaaatat ctactaaatg aatatttgca tatagtaata ttttaaggta ctaaaagcag |
| 6181 | ctcaaagtaa atatattaat atattaattc cattgctatc tggataacca ctcaactttc |
| 6241 | ctgctgaaaa tgcccattta attaaagaag gttggataga gctctctata tgcattttgg |
| 6301 | acaggcaggg gtttcaggtc ataaacattc tgatgagtta atataaaata agagaaactg |
| 6361 | taaatttcca ctactaaaaa tcacaaaaat aacagaaaca aaagaagaga taagaatttg |
| 6421 | gggaattgtg ctgaacaatt tagtggttaa aaaaaacaac tgtgcatgtt tagacttaaa |
| 6481 | taagccccca tccaagtgtg aggggtccag taatttttca aaacatatga aagtgttaat |
| 6541 | acatttcgac aaaggaccat taaaaaagtc ctgaattctg acttgaggga ggaaagtaat |
| 6601 | gactaataca ttctctagag acttgcagac tttgggaatt cataaaggaa tggatgataa |
| 6661 | ttattaactg ttgctggctg attgcccaga cagttctcaa cagccctgta caagtctctg |
| 6721 | ggtttgggat ggatcaattc tgagactgga aaatggccaa atctttgcaa atgagaaata |
| 6781 | tttttcttat aagttcttat tgtaggcaaa taattacata gattattcat cagagaattt |
| 6841 | ttaaatgctc ataatctcaa ctctttcatt tacaacttgt atttccaata gtttatgggt |
| 6901 | catctctgca tagatgtcag aagtcacctc aagtttagcg tgtccaaaat ctaactcaca |
| 6961 | ggtctgtttc tgacctccca acttgctttc cttgtgtttt tcctatgcta atgatccacc |
| 7021 | ataatcaaaa taattaacat ttatccagtg cctactatgt actattccct gtcctgtttt |
| 7081 | acatttactc atttaaagtc cataagaaac attaaatctc atctgccttc tgaagaagat |
| 7141 | acaaccatgc tctcttttac aaagtaggaa actgggtcdc agaaaggtga agtctttaag |
| 7201 | gctgaatcac agtagctcat cctagtaaat agaaaagcca ggattcaact ccaggggctg |
| 7261 | ggtgcagaac tgctattctt cactgcttca ccaatcagca gctacccaag gcagaaaact |
| 7321 | ttttcatcct tggctccttc attctccctg tcaccccaga tcccctctac atctagtcag |
| 7381 | agaataggtc ctgtcaattc caacttctct atatggatcc tctcaggcat gtgcccttaa |
| 7441 | ttggcctaat tctctaatac accttccctc tacatgatca ctccctcaga tcattgcttt |
| 7501 | atcacgtgtt acctgggttg ctattacata aagagcaatc tttctaaaat gaggatctta |
| 7561 | tcacttcact tccacactaa aatgtttttc ctggggaacc acactcctta gcaatctgac |
| 7621 | ccatcagacc ttccaggctg tctcctgcct gctccataag gctccagcca cacagaatta |
| 7681 | tcatgggccc acacacccac caaatcctcc catgcctttg cccatgttgt ctgggatgcc |
| 7741 | cttctctccc ttctgtctac atcaagcatc agactgaata tccctcttgt gcggccttct |
| 7801 | aaaacctccc gtccaaagcg aaatatattg ccctctattt atacttttac agcatttggc |
| 7861 | acacaagtac agagtagtag ctttttatca cattctctga taattatata gatatggtat |
| 7921 | ttcttagctc tctctccaac tggctaataa gttgcttttt gtctgagtgc ctaattttgt |
| 7981 | gttttgtgtc tgagtgcctc agttcctcaa aaaaaggttt tttgattagt tcattattca |
| 8041 | tttgaacatg gaaattatgc tcactagtgg caaatgccac taaccgtatt ccagaagcta |
| 8101 | ggtgtcatgt ttgcaataag atatattatc ccttctacaa gtcacctttt atttcaggca |
| 8161 | tttgtaaatg cccattaata aagtatggtt cataaatttt accttgtaag tgcctaagaa |
| 8221 | atgagactac aagctccatt tcagcaggac acaataaata ttattttata atgcatctaa |
| 8281 | aaaaaaaaaa aaaaaa |

SEQ ID NO: 203 Human CD84 Isoform 1 Amino Acid Sequence (NP_001171808.1)

| | |
|---|---|
| 1 | maqhhlwill iclqtwpeaa gkdseiftvn gilgesvtfp vniqeprqvk iiawtsktsv |
| 61 | ayvtpgdset apvvtvthrn yyerihalgp nynlvisdlr medagdykad intqadpytt |
| 121 | tkrynlqiyr rlgkpkitqs lmasvnstcn vtltcsveke eknvtynwsp lgeegnvlqi |
| 181 | fqtpedqelt ytctaqnpvs nnsdsisarq lcadiamgfr thhtgllsvl amffllvlii |
| 241 | ssvflfrlfk rrqgrifpeg sclntftknp yaaskktiyt yimasrntqp aesriydeil |
| 301 | qskvlpskee pvntvysevq fadkmgkast qdskppgtss yeivi |

SEQ ID NO: 204 Human CD84 Transcript Variant 2 cDNA Sequence (NM_003874.3;
CDS: 80-1066)

| | |
|---|---|
| 1 | gccggaagaa aactcaagtg aaactgactc tgctagaaca gtgccgtgct tttccacaga |
| 61 | aggttagacc ctgaaagaga tggctcagca ccacctatgg atcttgctcc tttgcctgca |
| 121 | aacctggccg gaagcagctg gaaaagactc agaaatcttc acagtgaatg ggattctggg |
| 181 | agagtcagtc actttccctg taaatatcca agaaccacgg caagttaaaa tcattgcttg |
| 241 | gacttctaaa acatctgttg cttatgtaac accaggagac tcagaaacag cacccgtagt |
| 301 | tactgtgacc cacagaaatt attatgaacg gatacatgcc ttaggtccga actacaatct |
| 361 | ggtcattagc gatctgagga tggaagacgc aggagactac aaagcagaca taaatacaca |
| 421 | ggctgatccc tacaccacca ccaagcgcta caacctgcaa atctatcgtc ggcttgggaa |
| 481 | accaaaaatt acacagagtt taatggcatc tgtgaacagc acctgtaatg tcacactgac |
| 541 | atgctctgta gagaaagaag aaaagaatgt gacatacaat tggagtcccc tgggagaaga |
| 601 | gggtaatgtc cttcaaatct tccagactcc tgaggaccaa gagctgactt acacgtgtac |
| 661 | agcccagaac cctgtcagca acaattctga ctccatctct gcccggcagc tctgtgcaga |
| 721 | catcgcaatg ggcttccgta ctcaccacac cgggttgctg agcgtgctgg ctatgttctt |
| 781 | tctgcttgtt ctcattctgt cttcagtgtt tttgttccgt ttgttcaaga gaagacaaga |
| 841 | tgctgcctca aagaaaacca tatacacata tatcatggct tcaaggaaca cccagccagc |
| 901 | agagtccaga atctatgatg aaatcctgca gtccaaggtg cttccctcca aggaagagcc |
| 961 | agtgaacaca gtttattccg aagtgcagtt tgctgataag atggggaaag ccagcacaca |
| 1021 | ggacagtaaa cctcctggga cttcaagcta tgaaattgtg atctaggctg ctgggctgaa |
| 1081 | ttctccctct ggaaactgag ttacaaccac caatactggc aggttccctg gatccagatc |
| 1141 | ttctctgccc aactcttact gggagattgc aaactgccac atctcagcct gtaagcaaag |
| 1201 | caggaaacct tctgctcggc atagcttgtg cctaaatgga caaatggatg catacccttc |
| 1261 | ctgaaatgac tcccttctga atgaatgaca aagcaggtta cctagtatag ttttcccaaa |
| 1321 | cttcttccca tcatagcaca tgtagaaaat aatattttta tggcacactg ggataaacaa |
| 1381 | gcaagattgc tcacttctgg aagctgcata tgactagagg cctcttgtga ctggaggtaa |
| 1441 | caaccctgcc cagtaactgt gggagaaggg gatcaatatt ttgcacacct gtaataggcc |
| 1501 | atggcacacc agccaagatg ctctgctcac agtcagtatg tgtgaagatc cctggtgcgt |
| 1561 | ggccttcacc acgcatcttg agcaaattag gaaaatgtac ccttcgcttg aggcagatgc |
| 1621 | agcccttccc ccgagtgcat ggcttggaga gcagaatgtg ggctgcatat aagcacactc |
| 1681 | atccctttgt ctgggaatct ttgtgcaggg cataacaggc ttagtaagtc caaacacaga |
| 1741 | tgacagtgct gtgtgggtct ctgtcagagt tgtggctctc agccatgtag acacactctc |
| 1801 | caaatggagt gttggaaaat gttctttctg cagggtctag agactgctgg gacacttttc |
| 1861 | ttggagtgct acttcagaag ccttatagga ttttctttct ggccaagatt tccttctgta |
| 1921 | tcactccaag cagcctcagc agaagaagca gccatgccca gtattcccac tctccaaaag |
| 1981 | gaactgacca gcttatattt ctcacacttc tggggaactg ggtataatcc aaccatcaaa |
| 2041 | atagaagacc ttgcaagaag cagagtcatt ctccagaagg aacttgggag atgatggtgc |
| 2101 | agatgatgaa actgggttca tcccagttcc aaagactcag agaactagag tttaagctga |
| 2161 | ggcagagtgc cgccaccctg gcatgcccca caaacagatc accagccagc ttacacaggc |
| 2221 | attaactctc ctcaatgagg aagaatcatt cacaactgag caagacattc atatgatcat |
| 2281 | ttaaggaagt gtttccctta tgtgttagca agtataatcg gctaactcct aaatcccaat |
| 2341 | gaatagtcct aggctggaca gcaatgggct gcaattaggc agataaagac atcagtccca |
| 2401 | gtaaatgaat ccatagactc atctagcacc aactaccatt agcactatgt taggagctgc |
| 2461 | aaggccccaa agtagaagat gtgcataatg tctgctcttg tgtagctcag gagacaattc |
| 2521 | cagcacagac actacagtta acgctgaact gcagctgcaa gtaatagcat gaacagtcag |
| 2581 | aaaaatacct tatgaggggg cagggctgaa gctgggcctt gaaggatgga tgaaatttgg |
| 2641 | atagagaatg aggaagacag agggcctcca agtgagagaa gcatgaaaaa tgagcagggg |
| 2701 | cctggatcag tggggtgtat tcagagcacc tctccagatg caccatgcat gctcacagtc |
| 2761 | ccttgcctat gtgtggcaga gtgtcccagc cagatgtgtg ccctcacccc atgtccattt |
| 2821 | acatgtcctt caatgcccac ctcaaaaggt acctcttctg taaagctttc cctggtatca |
| 2881 | ggaatcaaaa ttaatcaggg atcttttcac actgctgttt tttcctcttt ggtccttcta |
| 2941 | tcactaaaac tcatctcatt cagccttaca gcataactaa ttatttgttt tcctcactac |
| 3001 | attgtacatg tgggaattac agataaacgg aagccggctg gggtggtggc tcacgcctgt |
| 3061 | aatcccaaca ctttgggagg ccaaggcagg cggatcacct gaggtcagga gttcgagatt |
| 3121 | agtctggcca acatggtgaa accccatctc tactaaaaat acgaaattag ccaggtgtgg |
| 3181 | tggcacacat ctgtagtccc agctactctg gaggctgaga caggagaatc gcttgaaccc |
| 3241 | aggaagtgga ggttgcagtg agctgagatc acaccactgc actccagcct gggagagaca |
| 3301 | gagtgagact ccatctcgaa aaaaaaaaaa agatagaagc caataagcat ggtgcaatca |
| 3361 | aattctggca agcattaaat atcaggatgc agctgggcac ggtggctcac gcctgtaatc |
| 3421 | ccagcacttt gggaggccaa ggtgggcgga tcacttgagg tcaggaattt gagaggatcc |
| 3481 | tggccagcat ggcaaaaccc catctgtact taaaatacaa aaaaattagc tgggcgtggt |
| 3541 | ggtgcacacc tgtaatccca gctacttggg aggctgaggt gggagaattg cttgaacctg |
| 3601 | ggaggtggag gttgcagtga gctgagatcc tgccactgca ctccaggctg ggcaacagag |
| 3661 | tgagaccatg tctcaaaaaa taaaaataaa ataaaataat atcaggatgc atacatcaga |
| 3721 | ggctgttcct agtgtaaagg cactttggag ggagaagact ttcagagtta ggcagaccaa |
| 3781 | ctaagaggtc agctgaagca cctaaccagt tgtaaggagg tgaaagacag caccccaaga |
| 3841 | agagacgtgc aggaaggagg aaagaggctt ggtcataaag gatggaggaa ttccaaagtg |
| 3901 | acactgaaca ggctgcgttt atcctaaaat aaaaccactc ctcactctgt ggatgcgttg |
| 3961 | aagactcatt cccaaacatc tttattctct aacttgccct cttcctcttc ctaatatgct |
| 4021 | cactcaagta aaattactag tgtcctaatg cccctatgca tattgtcaaa aataaaaatc |
| 4081 | agaagcaggt tagatctgtt aggtcttcca gaagagcaaa cctgggatga agccagagcc |
| 4141 | caggaattct gaaggtagcc tttggactca ggacacccta ctcttgtctc tcctctcagt |
| 4201 | ttctctgcta tgaatctcct gattcatgaa cacgttatct gttcaccctt ctctctaggt |
| 4261 | cttagttctt agattttcct tctgtaaaat gcatgtgatc ttattttccc ctccacaact |
| 4321 | ttccagatga actagactgt gaccaagagg tctataaaat caaagcatca tggaacagga |
| 4381 | tcttgtatca gaccaaagtg tgccagtttt taaaaatgtg catcaaaatg gaagtctcag |
| 4441 | agacagagcc ctctggtgga aagttctagt aggttaggac agtcctgcct gcagacacct |
| 4501 | tgggctttac tgagggactc aactgagaaa atgaggaatg ttgcagctca tgattcttag |
| 4561 | aagaagaaag tgaagcttgt ttaaaatatg atttaaaaaa factgtagaa actgtaaact |
| 4621 | acacaggcta tgagggaata gcctggttgg gccagcttgg aaatcgggca caggcaggaa |
| 4681 | ggggcctgtc tggtttgggc cgtgtccaca gagagcactt cttaggtcct gcctggagag |
| 4741 | aaggaatggc tgggctatat tttcttccag actcattatt tttcttctgt ttgacttttc |
| 4801 | tctgaatttc ccttgatttg tataaatttt ctcaataatt agtgacagtg tctactgatt |
| 4861 | gtaaaatgaa gcttgaaggc caggcgcagt ggctcatgcc tgtaatccta gaattttggg |
| 4921 | aggccaaggt gggtggatca caaggagttc gagaccagcc tggccaaggt tgtgaaaccg |
| 4981 | cgtctctact aaaaatacaa aaaaattagc cgggcatggt ggcacgtgcc tgtagtccca |
| 5041 | gctactcagg aagctgaggc aacagaatca cttgaacctg ggaggtggag gttgcagtga |
| 5101 | gccgagatca cgccactgca ctccagcctg ggcgagagag tgagactccg tctcaaaaaa |
| 5161 | aaaaaaaaaa aaaaaagttt gaagaacaaa gacaataaga ggaaatataa tgagtggtca |
| 5221 | taaatgtggg ctctgacagt agagtgcctg ggtctgcatc ctggtttctt agtcatgtga |
| 5281 | ccttaggcaa gttactttaa cctcgctgta cctcaggttg tccatctgta aaatggggat |
| 5341 | aataatagtg cctacctttt aaggttgatg tggggattaa atgaggtgtt gctcatacag |
| 5401 | gaatgtgcct gtgcatggca aagttcggga aattttttat aagctgttct aggcctgaaa |
| 5461 | tcttcagaag atgctaatct aaattcatga aataagcttc ttacaacaga aatgctgcta |
| 5521 | gtattatgca aaattaatgt tgtatatcaa acttttaact ctcatccctc cttattcaga |
| 5581 | tatattttgt tataagcaat gtttgttccc ctcgttatta taccacagtc tacttacctg |
| 5641 | atgctatatc tgcctcccca gttagactga gagaacaggg gatataccta aataataata |
| 5701 | ataataataa taataataaa taataatgga gagctccttg aagataggga gcctgtaaga |
| 5761 | atcattgagg gcttattttg tataccaact gctaaactag atgcttcata cattgttgtc |
| 5821 | aatactcatg acagccttgt aaagtagaaa ttaattcttc cagttaacac taaggctgac |
| 5881 | atatgaatac cttggcaaat ctggaaagct gggaagacag tatttgaatt caagacttct |
| 5941 | tgtcaccaag ggccatgcac ttgtactctg ccatgtggcc cttttttacc tcctgtggat |
| 6001 | tctccctacc tggtacttgg ccttaggtgt acacacacct ggcactttgc ttgacacata |
| 6061 | ataggtggac cacaaatatc tactaaatga atatttgcat atagtaatat tttaaggtac |
| 6121 | taaaagcagc tcaaagtaaa tatattaata tattaattcc attgctatct ggataaccac |
| 6181 | tcaactttcc tgctgaaaat gcccatttaa ttaaagaagg ttggatagag ctctctatat |
| 6241 | gcattttgga caggcagggg tttcaggtca taaacattct gatgagttaa tataaaataa |
| 6301 | gagaaactgt aaatttccac tactaaaaat cacaaaaata acagaaacaa aagaagagat |
| 6361 | aagaatttgg ggaattgtgc tgaacaattt agtggttaaa aaaaacaact gtgcatgttt |
| 6421 | agaacttaaa aagcccccat ccaagtgtga ggggtccagt aatttttcaa aacatatgaa |
| 6481 | agtgttaata catttcgaca aaggaccatt aaaaaagtcc tgaattctga cttgagggag |
| 6541 | gaaagtaatg actaatacat tctctagaga cttgcagact ttgggaattc ataaaggaat |
| 6601 | ggatgataat tattaactgt tgctggctga ttgcccagac agttctcaac agccctgtac |
| 6661 | aagtctctgg gtttgggatg gatcaattct gagactggaa aatggccaaa tctttgcaaa |
| 6721 | tgagaaatat ttttcttata agttcttatt gtaggcaaat aattacatag attattcatc |
| 6781 | agagaatttt taaatgctca taatctcaac tctttcattt acaacttgta tttccaatag |
| 6841 | tttatgggtc atctctgcat agatgtcaga agtcacctca agtttagcgt gtccaaaatc |
| 6901 | taactcacag gtctgtttct gacctcccaa cttgctttcc ttgtgttttt cctatgctaa |
| 6961 | tgatccacca taatcaaaat aattaacatt tatccagtgc ctactatgta ctattccctg |
| 7021 | tcctgtttta catttactca tttaaagtcc ataagaaaca ttaaatctca tctgccttct |
| 7081 | gaagaagata caaccatgct ctcttttaca aagtaggaaa ctgggtcaca gaaaggtgaa |
| 7141 | gtctttaagg ctgaatcaca gtagctcatc ctagtaaata gaaaagccag gattcaactc |
| 7201 | caggggctgg gtgcagaact gctattcttc actgcttcac caatcagcag ctacccaagg |
| 7261 | cagaaaactt tttcatcctt ggctccttca ttctccctgt caccccagat cccctctaca |
| 7321 | tctagtcaga gaataggtcc tgtcaattcc aacttctcta tatggctcct ctcaggcatg |
| 7381 | tgcccttaat tggcctaatt ctctaataca ccttccctct acatgctcac tccctcagat |
| 7441 | cattgcttta tcacgtgtta cctgggttgc tattacataa agagcaatct ttctaaaatg |
| 7501 | aggatcttat cacttcactt ccacactaaa atgtttttcc tggggaacca cactccttag |
| 7561 | caatctgacc catcagacct tccaggctgt ctcctgcctg ctccctaagg ctccagccac |
| 7621 | acagaattat catgggccca cacacccacc aaatcctccc atgcctttgc ccatgttgtc |
| 7681 | tgggatgccc ttctctccct tctgtctaca tcaagcatca gactgaatat ccctcttgtg |
| 7741 | cggccttcta aaacctcccg tccaaagcga aatatattgc cctctattta tacttttaca |
| 7801 | gcatttggca cacaagtaca gagtagtagc tttttatcac attctctgat aattatatag |
| 7861 | atatggtatt tcttagctct ctctccaact ggctaataag ttgctttttg tctgagtgcc |
| 7921 | taattttgtg ttttgtgtct gagtgcctca gttcctcaaa aaaaggtttt ttgattagtt |
| 7981 | cattattcat ttgaacatgg aaattatgct cactagtggc aaatgccact aaccgtattc |
| 8041 | cagaagctag gtgtcatgtt tgcaataaga tatattatcc cttctacaag tcacctttta |
| 9101 | tttcaggcat ttgtaaatgc ccattaataa agtatggttc ataaatttta ccttgtaagt |
| 9161 | gcctaagaaa tgagactaca agctccattt cagcaggaca caataaatat tattttataa |
| 9221 | tgcatctaaa aaaaaaaaaa aaaaa |

SEQ ID NO: 205 Human CD84 Isoform 2 Amino Acid Sequence (NP_003865.1)

| | |
|---|---|
| 1 | maqhhlwill lclqtwpeaa gkdseiftvn gilgesvtfp vniqeprqvk iiawtsktsv |
| 61 | ayvtpgdset apvvtvthrn yyerihalgp nynlvisdlr medagdykad intqadpytt |
| 121 | tkrynlqiyr rlgkpkitqs lmasvnstcn vtltcsveke eknvtynwsp lgeeghvlqi |
| 161 | fqtpedqelt ytctaqnpvs nnsdsisarq lcadiamgfr thhtgllsvl amffllvlil |
| 241 | ssvflfrlfk rrqdaaskkt iytvimasrn tqpaesriyd eilqskvlps keepvntvys |
| 301 | evqfadkmgk astqdskppg tssyeivi |

SEQ ID NO: 206 Human CD84 Transcript Variant 3 cDNA Sequence
(NM_001184881.1; CDS: 80-898)

| | |
|---|---|
| 1 | ggaggaagaa aactcaagtg aaactgactc tgctagaaca gtgccgtgct tttccacaga |
| 61 | aggttagacc ctgaaagaga tggctcagca ccacctatgg atcttgctcc tttgcctgca |
| 121 | aacctggccg gaagcagctg gaaaagactc agaaatcttc acagtgaatg ggattctagg |
| 181 | agagtcagtc actttcccta taaatatcca agaaccacgg caagttaaaa tcattgcttg |
| 241 | gacttctaaa acatctattg cttatgtaac accaggagac tcagaaacag cacccgtagt |
| 301 | tactgtgacc cacagaaatt attatgaacg gatacatgcc ttaggtccga actacaatct |
| 361 | ggtcattagc gatctgagga tggaagacgc aggagactac aaagcagaca taaatacaca |
| 421 | ggctgatccc tacaccacca ccaagcgcta caacctgcaa atctatcgtc ggcttgggaa |
| 481 | accaaaaatt acacaaagtt taatggcatc tgtgaacagc acctataatg tcacactgac |
| 541 | atgctctgta gagaaagaag aaaagaatgt gacatacaat tggagtcccc tgggagaaga |
| 601 | gagtaatatc cttcaaatct tccagactcc tgaggaccaa gagctgactt acacgtgtac |
| 661 | agcccagaac cctgtcagca acaattctga ctccatctct gcccggcagc tctgtgcaga |
| 721 | catcgcaatg ggcttccgta ctcaccacac caggttgctg agcgtgctgg ctatattctt |
| 781 | tctgcttgtt ctcattctgt cttcagtgtt tttattccgt ttgttcaaga gaagacaagg |
| 841 | tgcttccctc caaggaagag ccagtgaaca cagtttattc cgaagtgcag tttgctgata |
| 901 | agatggggaa agccagcaca caggacagta aacctcctgg gacttcaagc tatgaaattg |
| 961 | tgatctaggc tgctaggctg aattctccct ctggaaactg agttacaacc accaatactg |
| 1021 | gcaggttccc tggatccaga tcttctctgc ccaactctta ctaggagatt gcaaactgcc |
| 1081 | acatctcagc ctgtaagcaa agcaggaaac cttctgctga gcatagcttg tgcctaaatg |
| 1141 | gacaaatgga tgcataccct tcctgaaatg actcccttct gaatgaatga caaagcaggt |
| 1201 | tacctagtat agttttccca aacttcttcc catcatagca catgtagaaa ataatatttt |
| 1261 | tatggcacac taggataaac aagcaagatt gctcacttct ggaagctgca tatgactaga |
| 1321 | ggcctcttgt gactggaggt aacaaccctg cccagtaact gtgggagaag gggatcaata |
| 1381 | ttttgcacac ctgtaatagg ccatggcaca ccagccaaga tgctctgctc acagtcagta |
| 1441 | tgtgtgaaga tccctggtgc gtggccttca ccacgcatct tgagcaaatt aggaaaatgt |
| 1501 | acccttcgct tgaggcagat gcagcccttc ccccgagtgc atggcttgga gagcagaatg |
| 1561 | tgggctgcat ataagcacac tcatcccttt gtctgagaat ctttgtgcag ggcataacag |
| 1621 | gcttagtaag tccaaacaca gatgacagtg ctgtgtggat ctctatcaga gttgtggctc |
| 1681 | tcagccatgt agacacactc tccaaatgga gtgttggaaa atattctttc tgcagggtct |
| 1741 | agagactgct gggacacttt tcttggagtg ctacttcaga agccttatag gattttcttt |
| 1801 | ctggccaaga tttccttctg tatcactcca agcagcctca gcagaagaag cagccatgcc |
| 1861 | cagtattccc actctccaaa aggaactgac cagcttatat ttctcacact tctgaggaac |
| 1921 | tgagtataat ccaaccatca aaatagaaga ccttgcaaga aacagagtca ttctccagaa |
| 1981 | ggaacttggg agatgatggt gcagatgatg aaactggatt catcccagtt ccaaagactc |
| 2041 | agagaactag agtttaagct gaggcagagt gccgccaccc tggcatgccc cacaaacaga |
| 2101 | tcaccagcca gcttacacag gcattaactc tcctcaatga ggaagaatca ttcacaactg |
| 2161 | agcaagacat tcatatgatc atttaaggaa gtgtttccct tatgtattag caagtataat |
| 2221 | cggctaactc ctaaatccca ataaatagtc ctaggctaaa cagcaatggg ctacaattag |
| 2281 | gcagataaag acatcagtcc cagtaaatga atccatagac tcatctagca ccaactacca |
| 2341 | ttagcactat gttaggagct gcaaggcccc aaagtagaag atgtgcataa tatctgctct |
| 2401 | tgtgtagctc aggagacaat tccagcacag acactacagt taacgctgaa ctgcagctgc |
| 2461 | aagtaatagc atgaacagtc agaaaaatac cttatgaggg ggcagggcta aagctaggcc |
| 2521 | ttgaaggatg gatgaaattt ggatagagaa tgaagaagac aaagggcctc caagtgagag |
| 2581 | aagcatgaaa aatgagcagg ggcctggatc agtggggtgt attcagagca cctctccaga |
| 2641 | tgcaccatgc atgctcacag tcccttgcct atgtgtggca gagtgtccca gccagatgtg |
| 2701 | tgccctcacc ccatgtccat ttacatgtcc ttcaatgccc acctcaaaag gtacctcttc |
| 2761 | tgtaaagctt tccgtggtat caagaatcaa aattaatcag ggatcttttc acactgctgt |
| 2821 | tttttcctct ttgatccttc tatcactaaa actcatctca ttcagcctta cagcataact |
| 2881 | aattatttgt tttcctcact acattgtaca tgtgggaatt acagataaac ggaagccggc |
| 2941 | tagggtgatg gctcacgcct gtaatcccaa cactttgaga ggccaaggca ggcggatcac |
| 3001 | ctgaggtcag gagttcgaga ttagtctggc caacatggtg aaaccccatc tctactaaaa |
| 3061 | atacaaaatt aaccaggtgt ggtggcacac atctgtagtc ccagctactc tggaggctga |
| 3121 | gacaggagaa tcacttgaac ccaggaagtg gaggttgcag tgagctgaga tcacaccact |
| 3181 | gcactccagc ctgggagaga cagagtgaga ctccatctcg aaaaaaaaaa aaagatagaa |
| 3241 | gccaataagc atggtgcaat caaattctgg caagcattaa atatcaggat gcagctgggc |
| 3301 | acggtggctc acgcctgtaa tcccagcact ttgggaggcc aaggtgggcg gatcacttga |
| 3361 | ggtcaggaat ttgagaggat cctggccagc atggcaaaac cccatctgta cttaaaatac |
| 3421 | aaaaaaatta gctgggcgtg gtggtgcaca cctgtaatcc cagctacttg ggaggctgag |
| 3481 | gtaggagaat tgcttgaacc taggaggtgg aggttgcagt gagctgagat cctgccactg |
| 3541 | cactccaggc tgggcaacag agtgagacca tgtctcaaaa aataaaaata aaataaaata |
| 3601 | atatcaggat gcatacatca gaggctattc ctaatgtaaa ggcactttaa agggagaaga |
| 3661 | ctttcagagt taggcagacc aactaaaagg tcaactgaag cacctaacca gttgtaagga |
| 3721 | cgtgaaagac agcaccccaa gaagagacgt gcaggaagga ggaaagaggc ttggtcataa |
| 3781 | aggatggagg aattccaaag tgacactgaa caggctgcgt ttatcctaaa ataaaaccac |
| 3841 | tcctcactct gtggatgcgt tgaagactca ttcccaaaca tctttattct ctaacttgcc |
| 3901 | ctcttcctct tcctaatatg ctcactcaag taaaattact agtgtcctaa tgcccctatg |
| 3961 | catattgtca aaaataaaaa tcagaagcag gttagatctg ttaggtcttc cagaagagca |
| 4021 | aacctgggat gaagccagag cccaggaatt ctgaaggtag cctttggact caggacaccc |
| 4081 | tactcttgtc tctcctctca gtttctctgc tatgaatctc ctgattcatg aacacgttat |
| 4141 | ctgttcaccc ttctctctag gtcttagttc ttagattttc cttctgtaaa atgcatgtga |
| 4201 | tcttattttc ccctccacaa ctttccagat gaactagact gtgaccaaga ggtctataaa |
| 4261 | atcaaagcat catggaacag gatcttgtat cagaccaaag tgtgccagtt tttaaaaatg |
| 4321 | tgcatcaaaa tggaagtctc agagacagag ccctctggtg gaaagttcta gtaggttagg |
| 4381 | acagtcctgc ctgcagacac cttgggcttt actgagggac tcaactgaga aaatgaggaa |
| 4441 | tgttgcagct catgattctt agaagaagaa agtgaagctt gtttaaaata tgatttaaaa |
| 4501 | aatctgtaga acactgtaaa ctacacaggc tatgagggaa tagcctggtt gggccagctt |
| 4561 | ggaaatcggg cacaggcagg aaggggcctg tctggtttgg gccgtgtcca cagagagcac |
| 4621 | ttcttaggtc ctgcctggag agaaggaatg gctgggctat attttcttcc agactcatta |
| 4681 | tttttcttct gtttgacttt tctctgaatt tcccttgatt tgtataaatt ttctcaataa |
| 4741 | ttagtgacag tgtctactga ttgtaaaatg aagcttgaag gccaggcgca gtggctcatg |
| 4801 | cctgtaatcc tagaattttg ggaggccaag gtgggtggat cacaaggagt tcgagaccag |
| 4861 | cctggccaag gttgtgaaac cgcgtctcta ctaaaaatac aaaaaaatta gcccggcatg |
| 4921 | gtggcacgtg cctgtagtcc cagctactca ggaagctgag gcaacagaat cacttgaacc |
| 4981 | tgggaggtgg aggttgcagt gagccgagat cacgccactg cactccagcc tgggcgagag |
| 5041 | agtgagactc cgtctcaaaa aaaaaaaaaa aaaaaaaagt ttgaagaaca aagacaataa |
| 5101 | gaggaaatat aatgagtggt cataaatgtg ggctctgaca gtagagtgcc tgggtctgca |
| 5161 | tcctggtttc ttagtcatgt gaccttaggc aagttacttt aacctcgctg tacctcaggt |
| 5221 | tgtccatctg taaaatgggg ataataatag tgcctacctt ttaaggttga tgtggggatt |
| 5281 | aaatgaggtg ttgctcatac aggaatgtgc ctgtgcatgg caaagttcgg gaaatttttt |
| 5341 | ataagctgtt ctaggcctga aatcttcaga agatgctaat ctaaattcat gaaataagct |
| 5401 | tcttacaaca gaaatgctgc tagtattatg caaaattaat gttgtatatc aaacttttaa |
| 5461 | ctctcatccc tccttattca gatatatttt gttataagca atgtttgttc ccctcgttat |
| 5521 | tataccacag tctacttacc tgatgctata tctgcctccc cagttagact gagagaacag |
| 5581 | gggatatacc taaataataa taataataat aataataata aataataatg gagagctcct |
| 5641 | tgaagatagg gagcctgtaa gaatcattga gggcttattt tgtataccaa ctgctaaact |
| 5701 | agatgcttca tacattgttg tcaatactca tgacagcctt gtaaagtaga aattaattct |
| 5761 | tccagttaac actaaggctg acatatgaat accttggcaa atctggaaag ctgggaagac |
| 5821 | agtatttgaa ttcaagactt cttgtcacca agggccatgc acttgtactc tgccatgtgg |
| 5881 | ccctttttta cctcctgtgg attctcccta cctggtactt ggccttaggt gtacacacac |
| 5941 | ctggcacttt gcttgacaca taataggtgg accacaaata tctactaaat gaatatttgc |
| 6001 | atatagtaat attttaaggt actaaaagca gctcaaagta aatatattaa tatattaatt |
| 6061 | ccattgctat ctggataacc actcaacttt cctgctgaaa atgcccattt aattaaagaa |
| 6121 | ggttggatag agctctctat atgcattttg gacaggcagg ggtttcaggt cataaacatt |
| 6181 | ctgatgagtt aatataaaat aagagaaact gtaaatttcc actactaaaa atcacaaaaa |
| 6241 | taacagaaac aaaagaagag ataagaattt ggggaattgt gctgaacaat ttagtggtta |
| 6301 | aaaaaaacaa ctgtgcatgt ttagacttaa ataagccccc atccaagtgt gaggggtcca |
| 6361 | gtaatttttc aaaacatatg aaagtgttaa tacatttcga caaaggacca ttaaaaaagt |
| 6421 | cctgaattct gacttgaggg aggaaagtaa tgactaatac attctctaga gacttgcaga |
| 6481 | ctttgggaat tcataaagga atggatgata attattaact gttgctggct gattgcccag |
| 6541 | acagttctca acagccctgt acaagtctct cggtttggga tggatcaatt ctgagactgg |
| 6601 | aaaatggcca aatctttgca aatgagaaat atttttctta taagttctta ttgtaggcaa |
| 6661 | ataattacat agattattca tcagagaatt tttaaatgct cataatctca actctttcat |
| 6721 | ttacaacttg tatttccaat agtttatggg tcatctctgc atagatgtca gaagtcacct |
| 6781 | caagtttagc gtgtccaaaa tctaactcac aggtctgttt ctgacctccc aacttgcttt |
| 6841 | ccttgtgttt ttcctatgct aatgatccac cataatcaaa ataattaaca tttatccagt |
| 6901 | gcctactatg tactattccc tgtcctgttt tacatttact catttaaagt ccataagaaa |
| 6961 | cattaaatct catctgcctt ctgaagaaga tacaaccatg ctctctttta caaagtagga |
| 7021 | aactgggtca cagaaaggtg aagtctttaa ggctgaatca cagtagctca tcctagtaaa |
| 7081 | tagaaaagcc aggattcaac tccaggggct gggtgcagaa ctgctattct tcactgcttc |
| 7141 | accaatcagc agctacccaa ggcagaaaac tttttcatcc ttggctcctt cattctccct |
| 7201 | gtcaccccag atcccctcta catctagtca gagaataggt cctgtcaatt ccaacttctc |
| 7261 | tatatggctc ctctcaggca tgtgccctta attggcctaa ttctctaata caccttccct |
| 7321 | ctacatgctc actccctcag atcattgctt tatcacgtgt tacctgggtt gctattacat |
| 7381 | aaagagcaat ctttctaaaa tgaggatctt atcacttcac ttccacacta aaatgttttt |
| 7441 | cctggggaac cacactcctt agcaatctga cccatcagac cttccaggct gtctcctgcc |
| 7501 | tgctccctaa ggctccagcc acacagaatt atcatgggcc cacacaccca ccaaatcctc |
| 7561 | ccatgccttt gcccatgttg tctgggatgc ccttctctcc cttctgtcta catcaagcat |
| 7621 | cagactgaat atccctcttg tgcggccttc taaaacctcc cgtccaaagc gaaatatatt |
| 7681 | gccctctatt tatactttta cagcatttgg cacacaagta cagagtagta gctttttatc |
| 7741 | acattctctg ataattatat agatatggta tttcttagct ctctctccaa ctggctaata |
| 7801 | agttgctttt tgtctgagtg cctaattttg tgttttgtgt ctgagtgcct cagttcctca |
| 7861 | aaaaaaggtt ttttgattag ttcattattc atttgaacat ggaaattatg ctcactagtg |
| 7921 | gcaaatgcca ctaaccgtat tccagaagct aggtgtcatg tttgcaataa gatatattat |
| 7981 | cccttctaca agtcaccttt tattacaggc atttgtaaat gcccattaat aaagtatggt |
| 8041 | tcataaattt taccttgtaa gtgcctaaga aatgagacta caagctccat ttcagcagga |
| 8101 | cacaataaat attattttat aatgcatcta aaaaaaaaaa aaaaaaa |

SEQ ID NO: 207 Human CD84 Isoform 3 Amino Acid Sequence (NP_001171810.1)

| | |
|---|---|
| 1 | maqhhlwill lclqtwpeaa gkdseiftvn gilgesvtfp vniqeprqvk iiawtsktsv |
| 61 | ayvtpgdset apvvtvthrn yyerihalgp nynlvisdlr medagdykad intqadpytt |
| 121 | tkrynlqiyr rlgkpkitqs lmasvnstcn vtltcsveke eknvtynwsp lgeegnvlqi |
| 181 | fqtpedqelt ytctaqnpvs nhsdsisarq lcadiamgfr thhtgllsvl amffllvlil |
| 241 | ssvflfrlfk rrqgaslqgr asehslfrsa vc |

SEQ ID NO: 208 Human CD84 Transcript Variant 4 cDNA Sequence
(NM_001184882.1; CDS: 80-724)

| | |
|---|---|
| 1 | ggaggaagaa aactcaagtg aaactgactc tgctagaaca gtgccgtgct tttccacaga |
| 61 | aggttagacc ctgaaagaga tggctcagca ccacctatgg atcttgctcc tttgcctgca |
| 121 | aacctgtcgg cttgggaaac caaaaattac acagagttta atggcatctg tgaacagcac |
| 181 | ctgtaatgtc acactgacat gctctgtaga gaaagaagaa aagaatgtga catacaattg |
| 241 | gagtcccctg ggaccagagg gtaatgtcct tcaaatcttc cagactcctg aggaccaaga |
| 301 | gctgacttac acgtgtacag cccagaaccc tgtcagcaac aattctgact ccatctctgc |
| 361 | ccggcagctc tgtgcagaca tcgcaatggg cttccgtact caccacaccg ggttgctgag |
| 421 | cgtgctggct atgttctttc tgcttgttct cattctgtct tcagtgtttt tgttccgttt |
| 481 | gttcaagaga agacaagatg ctgcctcaaa gaaaaccata tacacatata tcatggcttc |
| 541 | aaggaacacc cagccagcag agtccagaat ctatgatgaa atcctgcagt ccaaggtgct |
| 601 | tccctccaag gaagagccag tgaacacagt ttattccgaa gtgcagtttg ctgataagat |
| 661 | ggggaaagcc agcacacagg acagtaaacc tcctgggact tcaagctatg aaattgtgat |
| 721 | ctaggctgct gggctgaatt ctccctctgg aaactgagtt acaaccacca atactggcag |
| 781 | gttccctgga tccagatctt ctctgcccaa ctcttactgg gagattgcaa actgccacat |
| 841 | ctcagcctgt aagcaaagca ggaaaccttc tgctgggcat agcttgtgcc taaatggaca |
| 901 | aatggatgca tacccttcct gaaatgactc ccttctgaat gaatgacaaa gcaggttacc |
| 961 | tagtatagtt ttcccaaact tcttcccatc atagcacatg tagaaaataa tatttttatg |
| 1021 | gcacactggg ataaacaagc aagattgctc acttctggaa gctgcatatg actagaggcc |
| 1081 | tcttgtgact ggaggtaaca accctgccca gtaactgtgg gagaagggga tcaatatttt |
| 1141 | gcacacctgt aataggccat ggcacaccag ccaagatgct ctgctcacag tcagtatgtg |
| 1201 | tgaagatccc tggtgcgtgg ccttcaccac gcatcttgag caaattagga aaatgtaccc |
| 1261 | ttcgcttgag gcagatgcag cccttccccc gagtgcatgg cttggagagc agaatgtggg |
| 1321 | ctgcatataa gcacactcat ccctttgtct gggaatcttt gtgcagggca taacaggctt |
| 1381 | agtaagtcca aacacagatg acagtgctgt gtgggtctct gtcagagttg tggctctcag |
| 1441 | ccatgtagac acactctcca aatggagtgt tggaaaatgt tctttctgca gggtctagag |
| 1501 | actgctggga cacttttctt ggagtgctac ttcagaagcc ttataggatt ttctttctgg |
| 1561 | ccaagatttc cttctgtatc actccaagca gcctcagcag aagaagcagc catgcccagt |
| 1621 | attcccactc tccaaaagga actgaccagc ttatatttct cacacttctg gggaactggg |
| 1681 | tataatccaa ccatcaaaat agaagacctt gcaagaagca gagtcattct ccagaaggaa |
| 1741 | cttgggagat gatggtgcag atgatgaaac tgggttcatc ccagttccaa agactcagag |
| 1801 | aactagagtt taagctgagg cagagtgccg ccaccctggc atgccccaca aacagatcac |
| 1861 | cagccagctt acacaggcat taactctcct caatgaggaa gaatcattca caactgagca |
| 1921 | agacattcat atgatcattt aaggaagtgt ttcccttatg tgttagcaag tataatcggc |
| 1981 | taactcctaa atcccaatga atagtcctag gctggacagc aatgggctgc aattaggcag |
| 2041 | ataaagacat cagtcccagt aaatgaatcc atagactcat ctagcaccaa ctaccattag |
| 2101 | cactatgtta ggagctgcaa ggccccaaag tagaagatgt gcataatgtc tgctcttgtg |
| 2161 | tagctcagga gacaattcca gcacagacac tacagttaac gctgaactgc agctgcaagt |
| 2221 | aatagcatga acagtcagaa aaatacctta tgagggggca gggctgaagc tgggccttga |
| 2281 | aggatggatg aaatttggat agagaatgag gaagacagag ggcctccaag tgagagaagc |
| 2341 | atgaaaaatg agcaggggcc tggatcagtg gggtgtattc agagcacctc tccagatgca |
| 2401 | ccatgcatgc tcacagtccc ttgcctatgt gtggcagagt gtcccagcca cctgtgtgcc |
| 2461 | ctcaccccat gtccatttac atgtccttca atgcccacct caaaaggtac ctcttctgta |
| 2521 | aagctttccc tggtatcagg aatcaaaatt aatcagggat cttttcacac tgctgttttt |
| 2581 | tcctctttgg tccttctatc actaaaactc atctcattca gccttacagc ataactaatt |
| 2641 | atttgttttc ctcactacat tgtacatgtg ggaattacag ataaacggaa gccggctggg |
| 2701 | gtggtggctc acgcctgtaa tcccaacact ttgggaggcc aaggcaggcg gatcacctga |
| 2761 | ggtcaggagt tcgagattag tctggccaac atggtgaaac cccatctcta ctaaaaatac |
| 2821 | gaaattagcc aggtgtggtg gcacacatct gtagtcccag ctactctgga ggctgagaca |
| 2881 | ggagaatcgc ttgaacccag gaagtggagg ttgcagtgag ctgagatcac accactgcac |
| 2941 | tccagcctgg gagagacaga gtgagactcc atctcgaaaa aaaaaaaaag atagaagcca |
| 3001 | ataagcatgg tgcaatcaaa ttctggcaag cattaaatat caggatgcag ctgggcacgg |
| 3061 | tggctcacgc ctgtaatccc agcactttgg gaggccaagg tgggcggatc acttgaggtc |
| 3121 | aggaatttga gaggatcctg gccagcatgg caaaacccca tctgtactta aaatacaaaa |
| 3181 | aaattagctg ggcgtggtgg tgcacacctg taatcccagc tacttgggag gctgaggtgg |
| 3241 | gagaattgct tgaacctggg aggtggaggt tgcagtgagc tgagatcctg ccactgcact |
| 3301 | ccaggctggg caacagagtg agaccatgtc tcaaaaaata aaaataaaat aaaataatat |
| 3361 | caggatgcat acatcagagg ctgttcctag tgtaaaggca ctttggaggg agaagacttt |
| 3421 | cagagttagg cagaccaact aagaggtcag ctgaagcacc taaccagttg taaggaggtg |
| 3481 | aaagacagca ccccaagaag agacgtgcag gaaggaggaa agaggcttgg tcataaagga |
| 3541 | tggaggaatt ccaaagtgac actgaacagg ctgcgtttat cctaaaataa aaccactcct |
| 3601 | cactctgtgg atgcgttgaa gactcattcc caaacatctt tattctctaa cttgccctct |
| 3661 | tcctcttcct aatatgctca ctcaagtaaa attactagtg tcctaatgcc cctatgcata |
| 3721 | ttgtcaaaaa taaaaatcag aagcaggtta gatctgttag gtcttccaga agagcaaacc |
| 3781 | tgggatgaag ccagagccca ggaattctga aggtagcctt tggactcagg acaccctact |
| 3841 | cttgtctctc ctctcagttt ctctgctatg aatctcctga ttcatgaaca cgttatctgt |
| 3901 | tcacccttct ctctaggtct tagttcttag attttccttc tgtaaaatgc atgtgatctt |
| 3961 | attttcccct ccacaacttt ccagatgaac tagactgtga ccaagaggtc tataaaatca |
| 4021 | aagcatcatg gaacaggatc ttgtatcaga ccaaagtgtg ccagttttta aaaatgtgca |
| 4081 | tcaaaatgga agtctcagag acagagccct ctggtggaaa gttctagtag gttaggacag |
| 4141 | tcctgcctgc agacaccttg ggctttactg agggactcaa ctgagaaaat gaggaatgtt |
| 4201 | gcagctcatg attcttagaa ga.agaaagt aagcttgttt aaaatatgat ttaaaaaatc |
| 4261 | tgtagaacac tgtaaactac acaggctatg agggaatagc ctggttgggc cagcttggaa |
| 4321 | atcgggcaca ggcaggaagg ggcctgtctg gtttgggccg tgtccacaga gagcacttct |
| 4381 | taggtcctgc ctggagagaa ggaatggctg ggctatattt tcttccagac tcattatttt |
| 4441 | tcttctgttt gacttttctc tgaatttccc ttgatttgta taaattttct caataattag |
| 4501 | tgacagtgtc tactgattgt aaaatgaagc ttgaaggcca ggcgcagtgg ctcatgcctg |
| 4561 | taatcctaga attttgggag gccaaggtgg gtggatcaca aggagttcga gaccagcctg |
| 4621 | gccaaggttg tgaaaccgcg tctctactaa aaatacaaaa aaattagccg ggcatggtgg |
| 4681 | cacgtgcctg tagtcccagc tactcaggaa gctgaggcaa cagaatcact tgaacctggg |
| 4741 | aggtggaggt tgcagtgagc cgagatcacg ccactgcact ccagcctggg cgagagagtg |
| 4801 | agactccgtc tcaaaaaaaa aaaaaaaaaa aaaagtttga agaacaaaga caataagagg |
| 4861 | aaatataatg agtggtcata aatgtgggct ctgacagtag agtgcctggg tctgcatcct |
| 4921 | ggtttcttag tcatgtgacc ttaggcaagt tactttaacc tcgctgtacc tcaggttgtc |
| 4981 | catctgtaaa atggggataa taatagtgcc taccttttaa ggttgatgtg gggattaaat |
| 5041 | gaggtgttgc tcatacagga atgtgcctgt gcatggcaaa gttcgggaaa ttttttataa |
| 5101 | gctgttctag gcctgaaatc ttcagaagat gctaatctaa attcatgaaa taagcttctt |
| 5161 | acaacagaaa tgctgctagt attatgcaaa attaatgttg tatatcaaac ttttaactct |
| 5221 | catccctcct tattcagata tattttgtta taagcaatgt ttgttcccct cgttattata |
| 5281 | ccacagtcta cttacctgat gctatatctg cctccccagt tagactgaga gaacagggga |
| 5341 | tatacctaaa taataataat aataataata ataataaata ataatggaga gctccttgaa |
| 5401 | gatagggagc ctgtaagaat cattgagggc ttattttgta taccaactgc taaactagat |
| 5461 | gcttcataca ttgttgtcaa tactcatgac agccttgtaa agtagaaatt aattcttcca |
| 5521 | gttaacacta aggctgacat atgaatacct tggcaaatct ggaaagctgg gaagacagta |
| 5581 | tttgaattca agacttcttg tcaccaaggg ccatgcactt gtactctgcc atgtggccct |
| 5641 | tttttacctc ctgtggattc tccctacctg gtacttggcc ttaggtgtac acacacctgg |
| 5701 | cactttgctt gacacataat aggtggacca caaatatcta ctaaatgaat atttgcatat |
| 5761 | agtaatattt taaggtacta aaagcagctc aaagtaaata tattaatata ttaattccat |
| 5821 | tgctatctgg ataaccactc aactttcctg ctgaaaatgc ccatttaatt aaagaaggtt |
| 5881 | ggatagagct ctctatatgc attttggaca ggcaggggtt tcaggtcata aacattctga |
| 5941 | tgagttaata taaaataaga gaaactgtaa atttccacta ctaaaaatca caaaaataac |
| 6001 | agaaacaaaa gaagagataa gaatttgggg aattgtgctg aacaatttag tggttaaaaa |
| 6061 | aaacaactgt gcatgtttag acttaaataa gcccccatcc aagtgtgagg ggtccagtaa |
| 6121 | tttttcaaaa catatgaaag tgttaataca tttcgacaaa ggaccattaa aaaagtcctg |
| 6181 | aattctgact tgagggagga aagtaatgac taatacattc tctagagact tgcagacttt |
| 6241 | gggaattcat aaaggaatgg atgataatta ttaactgttg ctggctgatt gcccagacag |
| 6301 | ttctcaacag ccctgtacaa gtactctggg ttgggatgga tcaattctga gactggaaaa |
| 6361 | tggccaaatc tttgcaaatg agaaatattt ttcttataag ttcttattgt aggcaaataa |
| 6421 | ttacatagat tattcatcag agaattttta aatgctcata atctcaactc tttcatttac |
| 6481 | aacttgtatt tccaatagtt tatgggtcat ctctgcatag atgtcagaaa tcacctcaag |
| 6541 | tttagcgtgt ccaaaatcta actcacaggt ctgtttctga cctcccaact tgctttcctt |
| 6601 | gtgtttttcc tatgctaatg atccaccata atcaaaataa ttaacattta tccagtgcct |
| 6661 | actatgtact attccctgtc ctgttttaca tttactcatt taaagtccat aagaaacatt |
| 6721 | aaatctcatc tgccttctga agaagataca accatgctct cttttacaaa gtaggaaact |
| 6781 | gggtcacaga aaggtgaagt ctttaaggct gaatcacagt agctcatcct agtaaataga |
| 6841 | aaagccagga ttcaactcaa ggggctgggt gcagaactgc tattcttcac tgcttcacca |
| 6901 | atcagcagct acccaaggca gaaaactttt tcatccttgg ctccttcatt ctccctgtca |
| 6961 | ccccagatcc cctctacatc tagtcagaga ataggtcctg tcaattccaa cttctctata |
| 7021 | tggctcctct caggcatgtg cccttaattg gcctaattct ctaatacacc ttccctctac |
| 7081 | atgctcactc cctcagatca ttgctttatc acgtgttacc tgggttgcta ttacataaag |
| 7141 | agcaatcttt ctaaaatgag gatcttatca cttcacttcc acactaaaat gtttttcctg |
| 7201 | gggaaccaca ctccttagca atctgaccca tcagaccttc caggctgtct cctgcctgct |
| 7261 | ccctaaggct ccagccacac agaattatca tgggcccaca cacccaccaa atcctcccat |
| 7321 | gcctttgccc atgttgtctg ggatgccctt ctctcccttc tgtctacatc aagcatcaga |
| 7381 | ctgaatatcc ctcttgtgcg gccttctaaa acctcccgtc caaagcgaaa tatattgccc |
| 7441 | tctatttata cttttacagc atttggcaca caagtacaga gtagtagctt tttatcacat |
| 7501 | tctctgataa ttatatagat atggtatttc ttagctctct ctccaactgg ctaataagtt |
| 7561 | gctttttgtc tgagtgccta attttgtgtt ttgtgtctga gtgcctcagt tcctcaaaaa |
| 7621 | aaggtttttt gattagttca ttattcattt gaacatggaa attatgctca ctagtggcaa |
| 7681 | atgccactaa ccgtattcca gaagctaggt gtcatgtttg caataagata tattatccct |
| 7741 | tctacaagtc accttttatt tcaggcattt gtaaatgccc attaataaag tatggttcat |
| 7801 | aaattttacc ttgtaagtgc ctaagaaatg agactacaag ctccatttca gcaggacaca |
| 7861 | ataaatatta ttttataatg catctaaaaa aaaaaaaaaa aaa |

SEQ ID NO: 209 Human CD84 Isoform 4 Amino Acid Sequence (NP_001171811.1)

| | |
|---|---|
| 1 | maqhhlwill lclqtcrlgk pkitqslmas vnstcnvtlt csvekeeknv tynwsplgee |
| 61 | gnvlqifqtp edqeltytct aqnpvsnnsd sisarqlcad iamgfrthht gllsvlamff |
| 121 | llvlilssvf lfrlfkrrqd aaskktiyty imasrntqpa esriydeilq skvlpskeep |
| 181 | vntvysevqf adkmgkastq dskppgtssy eivi |

SEQ ID NO: 210 Human CD84 Transcript Variant 5 cDNA Sequence
(NM_001330742.1; CDS: 80-1099)

| | |
|---|---|
| 1 | ggaggaagaa aactcaagtg aaactgactc tgctagaaca gtgccgtgct tttccacaga |
| 61 | aggttagacc ctgaaagaga tggctcagca ccacctatgg atcttgctcc tttgcctgca |
| 121 | aacctggccg gaagcagctg gaaaagactc agaaatcttc acagtgaatg ggattctggg |
| 181 | agagtcagtc actttccctg taaatatcca agaaccacgg caagttaaaa tcattgcttg |
| 241 | gacttctaaa acatctgttg cttatgtaac accaggagac tcagaaacag cacccgtagt |
| 301 | tactgtgacc cacagaaatt attatgaacg gatacatgcc ttaggtccga actacaatct |
| 361 | ggtcattagc gatctgagga tggaagacgc aggagactac aaagcagaca taaatacaca |
| 421 | ggctgatccc tacaccacca ccaagcgcta caacctgcaa atctatcgtc ggcttgggaa |
| 481 | accaaaaatt acacagagtt taatggcatc tgtgaacagc acctgtaatg tcacactgac |
| 541 | atgctctgta gagaaagaag aaaagaatgt gacatacaat tggagtcccc tgggagaaga |
| 601 | gggtaatgtc cttcaaatct tccagactcc tgaggaccaa gagctgactt acacgtgtac |
| 661 | agcccagaac cctgtcagca acaattctga ctccatctct gcccggcagc tctgtgcaga |
| 721 | catcgcaatg ggcttccgta ctcaccacac cgggttgctg agcgttctgg ctatgttctt |
| 781 | tctgcttgtt ctcattctgt cttcagtgtt tttgttccgt ttgttcaaga gaagacaagg |
| 841 | ttcctgcttg aacaccttca ctaagaaccc ttatgctgcc tcaaagaaaa ccatatacac |
| 901 | atatatcatg gcttcaagga acacccagcc agcagagtcc agaatctatg atgaaatcct |
| 961 | gcagtccaag gtgcttccct ccaaggaaga gccagtgaac acagtttatt ccgaagtgca |
| 1021 | gtttgctgat aagatgggga aagccagcac acaggacagt aaacctcctg ggacttcaag |
| 1081 | ctatgaaatt gtgatctagg ctgctgggct gaattctccc tctggaaact gagttacaac |
| 1141 | caccaatact ggcaggttcc ctggatccag atcttctctg cccaactctt actgggagat |
| 1201 | tgcaaactgc cacatctcag cctgtaagca aagcaggaaa ccttctgctg ggcatagctt |
| 1261 | gtgcctaaat ggacaaatgg atgcataccc ttcctgaaat gactcccttc tgaatgaatg |
| 1321 | acaaaggagg ttacctagta tagttttccc aaacttcttc ccatcatagc acatgtagaa |
| 1381 | aataatattt ttatggcaca ctgggataaa caagcaagat tgctcacttc tggaagctgc |
| 1441 | atatgactag aggcctcttg tgactggagg taacaaccct gcccagtaac tgtgggagaa |
| 1501 | ggggatcaat attttgcaca cctgtaatag gccatggcac accagccaag atgctctgct |
| 1561 | cacagtcagt atgtgtgaag atccctggtg cgtggccttc accacgcatc ttgagcaaat |
| 1621 | taggaaaatg tacccttcgc ttgaggcaga tgcagccctt cccccgagtg catggcttgg |
| 1681 | agagcagaat gtgggctgca tataagcaca ctcatccctt tgtctgggaa tctttgtgca |
| 1741 | gggcataaca ggcttagtaa gtccaaacac agatgacagt gctgtgtggg tctctgtcag |
| 1801 | agttgtggct ctcagccatg tagacacact ctccaaatgg agtgttggaa aatgttcttt |
| 1861 | ctgcagggtc tagagactgc tgggacactt ttcttggagt gctacttcag aagccttata |
| 1921 | ggattttctt tctggccaag atttccttct gtatcactcc aagcagcctc agcagaagaa |
| 1981 | gcagccatgc ccagtattcc cactctccaa aaggaactga ccagcttata tttctcacac |
| 2041 | ttctggggaa ctgggtataa tccaaccatc aaaatagaag accttgcaag aagcagagtc |
| 2101 | attctccaga aggaacttgg gagatgatgg tgcagatgat gaaactgggt tcatcccagt |
| 2161 | tccaaagact cagagaacta gagtttaagc tgaggcagag tgccgccacc ctggcatgcc |
| 2221 | ccacaaacag atcaccagcc agcttacaca ggcattaact ctcctcaatg aggaagaatc |
| 2281 | attcacaact gagcaagaca ttcatatgat catttaagga agtgtttccc ttatgtgtta |
| 2341 | gcaagtataa tcggctaact cctaaatccc aatgaatagt cctaggctgg acagcaatgg |
| 2401 | gctgcaatta ggcagataaa gacatcagtc ccagtaaatg aatccataga ctcatctagc |
| 2461 | accaactacc attagcacta tgttaggagc tgcaaggccc caaagtagaa gatgtgcata |
| 2521 | atgtctgctc ttgtgtagct caggagacaa ttccagcaca gacactacag ttaacgctga |
| 2581 | actgcagctg caagtaatag catgaacagt cagaaaaata ccttatgagg gggcagggct |
| 2641 | gaagctgggc cttgaaggat ggatgaaatt tggatagaga atgaggaaga cagagggcct |
| 2701 | ccaagtgaga gaagcatgaa aaatgagcag gggcctggat cagtggggtg tattcagagc |
| 2761 | acctctccag atgcaccatg catgctcaca gtcccttgcc tatgtgtggc agagtgtccc |
| 2821 | agccagatgt gtgccctcac cccatgtcca tttacatgtc cttcaatgcc cacctcaaaa |
| 2881 | ggtacctctt ctgtaaagct ttccctggta tcaggaatca aaattaatca gggatctttt |
| 2941 | cacactgctg ttttttcctc tttggtcctt ctatcactaa aactcatctc attcagcctt |
| 3001 | acagcataac taattatttg ttttcctcac tacattgtac atgtgggaat tacagataaa |
| 3061 | cggaagccgg ctggggtggt ggctcacgcc tgtaatccca acactttggg aggccaaggc |
| 3121 | aggcggatca cctgaggtca ggagttcgag attagtctgg ccaacatggt gaaaccccat |
| 3181 | ctctactaaa aatacgaaat tagccaggtg tggtggcaca catctgtagt cccagctact |
| 3241 | ctggaggctg agacaggaga atcgcttgaa cccaggaagt ggaggttgca gtgagctgag |
| 3301 | atcacaccac tgcactccag cctgggagag acagagtgag actccatctc gaaaaaaaaa |
| 3361 | aaaagataga agccaataag catggtgcaa tcaaattctg gcaagcatta aatatcagga |
| 3421 | tgcagctggg cacggtggct cacgcctgta atcccagcac tttgggaggc caaggtgggc |
| 3481 | ggatcacttg aggtcaggaa tttgagagga tcctggccag catggcaaaa ccccatctgt |
| 3541 | acttaaaata caaaaaaatt agctgggcgt ggtggtgcac acctgtaatc ccagctactt |
| 3601 | gggaggctga ggtgggagaa ttgcttgaac ctgggaggtg gaggttgcag tgagctgaga |
| 3661 | tcctgccact gcactccagg ctgggcaaca gagtgagacc atgtctcaaa aaataaaaat |
| 3721 | aaaataaaat aatatcagga tgcatacatc agaggctgtt cctagtgtaa aggcactttg |
| 3781 | gagggagaag actttcagag ttaggcagac caactaagag gtcagctgaa gcacctaacc |
| 3841 | agttgtaagg aggtgaaaga cagcacccca agaagagacg tgcaggaagg aggaaagagg |
| 3901 | cttggtcata aaggatggag gaattccaaa gtgacactga acaggctgcg tttatcctaa |
| 3961 | aataaaacca ctcctcactc tgtggatgcg ttgaagactc attcccaaac atctttattc |
| 4021 | tctaacttgc cctcttcctc ttcctaatat gctcactcaa gtaaaattac tagtgtccta |
| 4081 | atgcccctat gcatattgtc aaaaataaaa atcagaagca ggttagatct gttaggtctt |
| 4141 | ccagaagagc aaacctggga tgaagccaga gcccaggaat tctgaaggta gcctttggac |
| 4201 | tcaggacacc ctactcttgt ctctcctctc agtttctctg ctatgaatct cctgattcat |
| 4261 | gaacacgtta tctgttcacc cttctctcta ggtcttagtt cttagatttt ccttctgtaa |
| 4321 | aatgcatgtg atcttatttt cccctccaca actttccaga tgaactagac tgtgaccaag |
| 4381 | aggtctataa aatcaaagca tcatggaaca ggatcttgta tcagaccaaa gtgtgccagt |
| 4441 | ttttaaaaat gtgcatcaaa atggaagtct cagagacaga gccctctggt ggaaagttct |
| 4501 | agtaggttag gacagtcctg cctgcagaca ccttgggctt tactgaggga ctcaactgag |
| 4561 | aaaatgagga atgttgcagc tcatgattct tagaagaaga aagtgaagct tgtttaaaat |
| 4621 | atgatttaaa aaatctgtag aacactgtaa actacacagg ctatgaggga atagcctggt |
| 4681 | tgggccagct tggaaatcgg gcacaggcag gaaggggcct gtctggtttg ggccgtgtcc |
| 4741 | acagagagca cttcttaggt cctgcctgga gagaaggaat ggctgggcta tattttcttc |
| 4801 | cagactcatt atttttcttc tgtttgactt ttctctgaat ttcccttgat ttgtataaat |
| 4861 | tttctcaata attagtgaca gtgtctactg attgtaaaat gaagcttgaa ggccaggcgc |
| 4921 | agtggctcat gcctgtaatc ctagaatttt gggaggccaa ggtgggtgga tcacaaggag |
| 4981 | ttcgagacca gcctggccaa ggttgtgaaa ccgcgtctct actaaaaata caaaaaaatt |
| 5041 | agccgggcat ggtggcacgt gcctgtagtc ccagctactc aggaagctga ggcaacagaa |
| 5101 | tcacttgaac ctgggaggtg gaggttgcag tgagccgaga tcacgccact gcactccagc |
| 5161 | ctgggcgaga gagtgagact ccgtctcaaa aaaaaaaaaa aaaaaaaaag tttgaagaac |
| 5221 | aaagacaata agaggaaata taatgagtgg tcataaatgt gggctctgac agtagagtgc |
| 5281 | ctgggtctgc atcctggttt cttagtcatg tgaccttagg caagttactt taacctcgct |
| 5341 | gtacctcagg ttgtccatct gtaaaatggg gataataata gtgcctacct tttaaggttg |
| 5401 | atgtggggat taaatgaggt gttgctcata caggaatgtg cctgtgcatg gcaaagttcg |
| 5461 | ggaaattttt tataagctgt tctaggcctg aaatcttcag aagatgctaa tctaaattca |
| 5521 | tgaaataagc ttcttacaac agaaatgctg ctagtattat gcaaaattaa tgttgtatat |
| 5581 | caaactttta actctcatcc ctccttattc agatatattt tgttataagc aatgtttgtt |
| 5641 | cccctcgtta ttataccaca gtctacttac ctgatgctat atctgcctcc ccagttagac |
| 5701 | tgagagaaca ggggatatac ctaaataata ataataataa taataataat aaataataat |
| 5761 | ggagagctcc ttgaagatag ggagcctgta accatcattg agggcttatt ttgtatacca |
| 5821 | actgctaaac tagatgcttc atacattgtt gtcaatactc atgacagcct tgtaaagtag |
| 5881 | aaattaattc ttccagttaa cactaaggct gacatatgaa taccttggca aatctggaaa |
| 5941 | gctgggaaga cagtatttga attcaagact tcttgtcacc aagggccatg cacttgtact |
| 6001 | ctgccatgtg gccctttttt acctcctgtg gattctccct acctggtact tggccttagg |
| 6061 | tgtacacaca cctggcactt tgcttgacac ataataggtg gaccacaaat atctactaaa |
| 6121 | tgaatatttg catatagtaa tattttaagg tactaaaagc agctcaaagt aaatatatta |
| 6181 | atatattaat tccattgcta tctggataac cactcaactt tcctgctgaa aatgcccatt |
| 6241 | taattaaaga aggttggata gagctctcta tatgcatttt ggacaggcag gggtttcagg |
| 6301 | tcataaacat tctgatgagt taatataaaa taagagaaac tgtaaatttc cactactaaa |
| 6361 | aatcacaaaa ataacagaaa caaaagaaga gataagaatt tggggaattg tgctgaacaa |
| 6421 | tttagtggtt aaaaaaaaca actgtgcatg tttagactta aataagcccc catccaagtg |
| 6481 | tgaggggtcc agtaattttt caaaacatat gaaagtgtta atacatttcg acaaaggacc |
| 6541 | attaaaaaag tcctgaattc tgacttgagg gaggaaagta atgactaata cattctctag |
| 6601 | agacttgcag actttgggaa ttcataaagg aatggatgat aattattaac tgttgctggc |
| 6661 | tgattgccca gacagttctc aacagccctg tacaagtctc tgggtttggg atggatcaat |
| 6721 | tctgagactg gaaaatggcc aaatctttgc aaatgagaaa tatttttctt ataagttctt |
| 6781 | attgtaggca aataattaca tagattattc atcagagaat ttttaaatgc tcataatctc |
| 6841 | aactctttca tttacaactt gtatttccaa tagtttatgg gtcatctctg catagatgtc |
| 6901 | accagtcacc tcaagtttag cgtgtccaaa atctaactca caggtctgtt tctgacctcc |
| 6961 | caacttgctt tccttgtgtt tttcctatgc taatgatcca ccataatcaa aataattaac |
| 7021 | atttatccag tgcctactat gtactattcc ctgtcctgtt ttacatttac tcatttaaag |
| 7081 | tccataagaa acattaaatc tcatctgcct tctgaagaag atacaaccat gctctctttt |
| 7141 | acaaagtagg aaactgggtc acagaaaggt gaagtcttta aggctgaatc acagtagctc |
| 7201 | atcctagtaa atagaaaagc caggattcaa ctccaggggc tgggtgcaga actgctattc |
| 7261 | ttcactgctt caccaatcag cagctaccca aggcagaaaa ctttttcatc cttggctcct |
| 7321 | tcattctccc tgtcacccca gatcccctct acatctagtc agagaatagg tcctgtcaat |
| 7381 | tccaacttct ctatatggct cctctcaggc atgtgccctt aattggccta attctctaat |
| 7441 | acaccttccc tctacatgct cactccctca gatcattgct ttatcacgtg ttacctgggt |
| 7501 | tgctattaca taaagagcaa tctttctaaa atgaggatct tatcacttca cttccacact |
| 7561 | aaaatgtttt tcctggggaa ccacacttct tagcaatctg acccatcaga ccttccaggc |
| 7621 | tgtctcctgc ctgctcccta aggctccagc cacacagaat tatcatgggc ccacacaccc |
| 7681 | accaaatcct cccatgcctt tgcccatgtt gtctgggatg cccttctctc ccttctgtct |
| 7741 | acatcaagca tcagactgaa tatccctctt gtgcggcctt ctaaaacctc ccgtccaaag |
| 7801 | cgaaatatat tgccctctat ttatactttt acagcatttg gcacacaagt acagagtagt |
| 7861 | agctttttat cacattctct gataattata tagatatggt atttcttagc tctctctcca |
| 7921 | actggctaat aagttgcttt ttgtctgagt gcctaatttt gtgttttgtg tctgagtgcc |
| 7981 | tcagttcctc aaaaaaaggt tttttgatta gttcattatt catttgaaca tggaaattat |
| 8041 | gctcactagt ggcaaatgcc actaaccgta ttccagaagc taggtgtcat gtttgcaata |
| 8101 | agatatatta tctcttctac aagtcacctt ttatttcagg catttgtaaa tgcccattaa |
| 8161 | taaagtatgg ttcataaatt ttaccttgta agtgcctaag aaatgagact acaagctcca |
| 8221 | tttcagcagg acacaataaa tattatttta taatgcatct a |

SEQ ID NO: 211 Human CD84 Isoform 5 Amino Acid Sequence (NP_001317671.1)

| | |
|---|---|
| 1 | maqhhlwill lclqtwpeaa gkdseiftvn gilgesvtfp vniqeprqvk iiawtsktsv |
| 61 | ayvtpgdset apvvtvthrn yyerihalgp nynlvisdlr medagdykad intqadpytt |
| 121 | tkrynlqivr rlgkpkitqs lmasvnstcn vtltcsveke eknvtvnwsp lgeegnvlqi |
| 181 | fqtpedqelt ytctaqnpvs nnsdsisarq lcadiamgfr thhtgllsvl amffllvlil |
| 241 | ssvflfrlfk rrqgsclntf tknpyaaskk tiytyimasr ntqpaesriy deilqskylp |
| 301 | skeepvntvy sevqfadkmq kastqdskpp gtssyeivi |

SEQ ID NO: 212 Mouse CD84 Transcript Variant 1 cDNA Sequence (NM_013489.3;
CDS: 180-1169)

| | |
|---|---|
| 1 | agtgcttgga gttcctctgt gactgaccac ttcttccttt tctgtctaat ggtgaacacc |
| 61 | tttctggacc agctctggac cagaatctga tttatgctct gctccggaaa caccacactg |
| 121 | aagtgaaagc agctaccaca ccagttattt ttcctcagaa gactggagtc tgactggaca |
| 181 | tggcccagcg ccatctgtgg atctggttcc tttgcctaca aacctggtct gaagcagcag |
| 241 | gaaaagatgc agacccggtg gtaatgaatg ggattcttgg ggagtcagtt actttcctct |
| 301 | taaatattca agaaccaaag aaaattgaca acattgactg gacttctcaa tcatctgttg |
| 361 | cttttataaa accaggagta aataaagctg aagttaccat aacccagggc acttataaag |
| 421 | gacgaataga aatcatagat cagaagtatg acatggtcat tagagacctg aggatggaag |
| 481 | atgcaggaac ttacaaagca gacatcaatg aagagaatga ggaaaccatc accaagatct |
| 541 | actaccttca tatctaccgt cgacttaaaa caccaaaaat tacacagagt ttgatatcat |
| 601 | ctttgaacaa tacctgtaat atcacactga catgctctgt ggaaaaggaa gaaaaggatg |
| 661 | tcacatatag ctggagtccc tttggagaga aaagcaatgt ccttcaaatc gtccactccc |
| 721 | ccatggacca aaaactgacc tacacatgta cagcccagaa ccctgtcagc aacagttctg |
| 781 | actctgtcac tgtccagcag ccatgtacag acactccaag cttccatcct cgccatgctg |
| 841 | tgttgccagg aggattggcc gtgctctttc tgcttattct cattccgatg ttggcatttc |
| 901 | tgttccgttt gtataagaga aggcgagaca ggattgtcct ggaagcagat gatgtctcaa |
| 961 | agaaaacagt atatgctgta gtttcaagaa atgctcaacc cacagagtcc agaatctatg |
| 1021 | atgaaatccc taagtccaag atgctgtcct gtaagaaaga tccggtgacc accatttatt |
| 1081 | cctaagtgca gctttctgag aagatgaagg aaaccaacat gaaggacaga agtctgccta |
| 1141 | aggatttggg taatgaaatt gttgtctagg tgattctcta agaccacgaa ggacacaagg |
| 1201 | acaagtcatc tatgaggatt gaatcaacgg tttcagtctt ttggatataa cctgggccag |
| 1261 | ccaagggatt taggaatgaa gcaagctccg tgggtagagg tctgatcccc agtgtgtaat |
| 1321 | gttaggggcc atgtacagga ttgactctca ggcccacaga tctttaccca gagaaaccct |
| 1381 | gacctgctcc catgatgttt ttcctgggga aaggacccta gggaactcaa cctttatgca |
| 1441 | atcagacatg cctctcagag actgtctaac agcttccaga ctaatctctg tgcagtactt |
| 1501 | agtcttacaa ctctcacggg caacggcttc aagttccaat tttacgatgt gtctagcctg |
| 1561 | ggatgactgt ttagtttcta atgtggcgag aatgtatgtt accatgtagg aagcacagac |
| 1621 | tatggcaatc tataaatgat ttgtggcatg agactgatgt ccgaatttag gggaagggga |
| 1681 | atggtcttac ttaggcattt tatggaaatt gagtctctct ccccgagaag agggtgatga |
| 1741 | agcagcatcc acgtctgcct cttctccagt aacctgcttg ttatcgacaa tgtccagccg |
| 1801 | atggtaatga actgaaacaa atgcgcttga aagagatgaa tcaatttgag atttaacaaa |
| 1861 | tcgggtcaat ttctgaaatg cccaaggaca gaaggagatc aataatagga gtcccaatag |
| 1921 | gggccctaaa agggagggca acaaggttga aagtcagggg gaggttgaaa accagttttg |
| 1981 | gtagtctacc ttccccctag gccattgtaa atacttgtgt atgggtgtaa ctcagctatc |
| 2041 | tatagttcta agtatccact ctggttcctc tttaggtctt aaacttactt cttcatagtt |
| 2101 | gatggtaaat tactgtgtaa ggcagtggcc tagcttttat taaaagtgat agtgtaatgc |
| 2161 | cagaggctat tatgaatgta actgaatagg caacactctc cctgaattct aagtccatgg |
| 2221 | tctgttcaag ggctttttag gacattggaa caccagtgaa ggcttagcta tgtcagaatt |
| 2281 | caatcttaaa atgcacttat aataagataa tattaaaaga gagcacatgg atctatacac |
| 2341 | cagactaact cgggaataga atatgagtac aaaatgggca gtatgcagat gctgaactaa |
| 2401 | ggctgtggta gatacctttt caaagtttgc attcccagat ttttaaacca aggatcgttt |
| 2461 | cctaactcta ataggcagca aaacgtaagc aggtctctaa caaaaacata acagtagatt |
| 2521 | ccttatctaa attaggatct acacaattag ttaattgaca agaattacaa tgaatataaa |
| 2581 | aagacttgcc aagattggcg atcttaactc ttaaaattat ctaacaataa gaatataggt |
| 2641 | aaggtacaca aactttcata gctataagga gctgacctga aaggccaaaa acagtgtctc |
| 2701 | tgacaaaagc atcttgtaca ttctctgtac cagtcttttt gcctcatgag tcagcttttt |
| 2761 | tagttgtttt tattttaagt tggcaccagg ttggtactcc ttgctgcagc ccatggcgga |
| 2821 | gatacgaagt ttctttatct gtttgtaagt ggctgctctc tgatttctct tcttttgtat |
| 2881 | actcaacata gatttctggt caccactgtc agggcactca caggtcacag gtcagcctgt |
| 2941 | cacattggaa gatagcatga tcttgtagca ttctgtggaa aaaacagaaa cattctctct |
| 3001 | tttccccata ttaagtatct gaacaggatc atggcaagtg ccaataagtg gatccttttt |
| 3061 | atctgtccta gacatcatta tatctagttt gttttttttt tgtaaataaa aatgtgattt |
| 3121 | tatgtgcaca gggatataat tcctaccttc tttgttttta aagaaggtat agtttttaaa |
| 3181 | gttttacaat accttgtctt tgagaattat aaaatatctc agtaacatgt gtaacattaa |
| 3241 | attgttaaca aaacatctct tggaggtttt gaaaataaaa attttgaagc |

SEQ ID NO: 213 Mouse CD84 Isoform 1 Amino Acid Sequence (NP_038517.1)

| | |
|---|---|
| 1 | maqrhlwiwf lclqtwseaa gkdadpvvmn gilgesvtfl lniqepkkid niawtsqssv |
| 61 | afikpgvnka evtitqgtyk grieiidqky dlvirdlrme dagtykadin eeneetitki |
| 121 | yylhiyrrlk tpkitqslis slnntcnitl tcsvekeekd vtyswspfge ksnvlqivhs |
| 181 | pmdqkltytc taqnpvsnss dsvtvqqpct dtpsfhprha vlpgglavlf llilipmlaf |
| 241 | lfrlykrrrd rivleaddvs kktvyavvsr naqptesriy deipqskmls ckkdpvttiy |
| 301 | ssvqlsekmk etnmkdrslp kalgneivv |

SEQ ID NO: 214 Mouse CD84 Transcript Variant 2 cDNA Sequence
(NM_001252472.1; CDS: 180-602)

| | |
|---|---|
| 1 | agtgcttgga gttcctctgt gactgaccac ttcttccttt tctgtctaat ggtgaacacc |
| 61 | tttctggacc agctctggac cagaatctga tttatgctct gctccggaaa caccacactg |
| 121 | aagtgaaagc agctaccaca ccagttattt ttcctcagaa gactggagtc tgactggaca |
| 181 | tggcccagcg ccatctgtgg atctggttcc tttgcctaca aacctggtct gaagcagcag |
| 241 | gaaaagatgc agacccggtg gtaatgaatg ggattcttgg ggagtcagtt actttcctct |
| 301 | taaatattca agaaccaaag aaaattgaca acattgcctg gacttctcaa tcatctgttg |
| 361 | cttttataaa accaggagtc aataaagctg aagttaccat aacccagggc acttataaag |
| 421 | gacgaataga aatcatagat cagaagtatg acctggtcat tagagacctg aggatggaag |
| 481 | atgcaggaac ttacaaagca gacatcaatg aagagaatga ggaaaccatc accaagatct |
| 541 | actaccttca tatctaccgt aagttatggc agcacggggc cttggattta cttttgattt |
| 601 | gaagatttat gatctaaacc acacccatat ttctgataac agagtttcct aactcttctt |
| 661 | atccttataa ttacataagc acatcagtac ttataaaggt ctaactttac ttctggcctt |
| 721 | gacagacttt agctgtaatc tgttttgcag cagaatttgt cctctgttct ttgttttcct |
| 781 | ttcctataaa atgtcaataa tcatattaat caatttgtaa gcattattat gacattctag |
| 841 | taagaaacta tatgcagagt ggtctttata aggcttctgc ttttaagata attacagaat |
| 901 | gcataggaaa atgcaaagaa ctatgaaagg atgtgttctg tgcccttctc ttgccctctc |
| 961 | ctctgttata ctagatccaa actcttagtc tcatcccccg tcttatacag accttctggg |
| 1021 | gtagcctttc ttcattgtct ctcctgattc caaagagata aaataagcag atcctggcac |
| 1081 | acacctttga ttccagcact caggaggcaa agacagaagg atctctatga gttcaaggct |
| 1141 | agcttggtct tcagagaaag ttccagaaca gccaagacta acaaaaagaa accctttctc |
| 1201 | aaaccaacct cccatcccca tcctcacccc ccaaaaacta ctagaatgaa agaaaaaaaa |
| 1261 | ataccaagac acaaaatgaa cagtgtctga ggaactctta tttctgtaag tattaatact |
| 1321 | ttcagaaatg cagaacagtg ttcaaggtca aaaacagaaa attggaactt tcttggaatg |
| 1381 | tgccagcact tacttaggaa tggaatcact tatattccta tagaatttaa tcacatatat |
| 1441 | agcaccggac agcattaatc acatatatag caccggacat cataagcaag gtagtagtga |
| 1501 | agcaccatcc caacattttc ttgtctcagt tctgcagggc agagaactgt tagccctgac |
| 1561 | tccagctttt tctacctaac agttttgtgc aggtgacatc tcgtccctgc tgagaaaatg |
| 1621 | aaatgagatt tagttttcac cactatggct gtaccaatac ctaccccaac gggtggcaca |
| 1681 | cacacacaca cacacacaca cacacacaca cacacacaca cacacacgtc tctccgaaaa |
| 1741 | taggtaaata atgatacttt tcttgtgttt cggctatttt ggaatattca gagcctactg |
| 1801 | ttgtagaata gctgggataa aatggagaca tcctgcccag gctgttattg actgtgcttt |
| 1861 | tttgttggca tctaggcatc tgggactggg atgattataa atctaggtga tgatgtttgg |
| 1921 | atttgtcttt gttgggtggg tggcttgttc cttgttttct gtttcctctc tggattttca |
| 1981 | gagagtgtgg tagctctatg ttttagtagg acattttctt tggatctgac atttatagcc |
| 2041 | actggaggtt ctcaataaaa gatgtttctg ggtattggga gctaacactt aggacctgtg |
| 2101 | ataggttagg agtatgaaag tgttcatagg agagagaaga agagtgttta gccaggatct |
| 2161 | gtttatttca tccccttgga atcagggaga cagtaaagtg aggtcaaccc acagggtctt |
| 2221 | ctctagatac tggggatgag actgggaagt tggatctaga ggaacagaag gaaacaggaa |
| 2281 | gatatacagg ctcctatctg cttctgggca ggaatgatct gggttagcag ggagtgcctg |
| 2341 | ctgaagatga gggctgggat aaaccaacaa gtggggagaa ggtgggtaga aagggaagat |
| 2401 | ctgtggaacc acaatagatg tgggattggg gatgtgcagg agtggggaca ttagaaggaa |
| 2461 | ggctgcagca ggtgttctgt tgcagagcta gggatgaagc tggagcttta gatttgtagg |
| 2521 | agaggaagcc ttctgttagc ttacatgttt cccaggcctg cttgggtggt gtgttcacaa |
| 2581 | ggaacactgg ttttggggac ttgtttactg gaatgaattg ggggaaggaa ggttggagta |
| 2641 | gaagatagag gtcctcaaag agaaaattaa taagtccaca aaatccaaac aaacagtgga |
| 2701 | aagaagtgaa taaactgtat aagacttgaa aatgaaaata aaatcaataa agaaaactaa |
| 2761 | aaccgagaga attctagaaa tgaaaatttt aagaatttga acagaaatta cagaggtaaa |
| 2821 | cttcaccaac aaaatatgag agatggaaga gagaatatta ggcattgaag atacaataga |
| 2881 | gaaaatgaat atatcagtca aagaaaatgt taaaccaaaa aaaaaaagtc ctaacaaaaa |
| 2941 | atacaaaaaa tttaggacac taagaaaaga caaaacctaa gactaataga aatataggaa |
| 3001 | ggaaaagaat tctacctcaa aggcccagaa aatatttcaa caaaatcata gaagaaaaat |
| 3061 | tttctcacct aaagaagata gatgcctata aggtatatga agcatatata acaacaaata |
| 3121 | gatttaacaa gaaaataaac tctccttggc acataacagt caaatcacaa agcatacaga |
| 3181 | acaaagaaag aatattaaaa gctacaaggg gaaaaggcca agtagtatat aaatgcagac |
| 3241 | ctagaatgat acctgatttc tcagtgaaga ctctaaaggc caatagagtc tggacaaatg |
| 3301 | tgctataaac tctaagagac cccagaggtc atccctgatt actataccca ccaaaatatc |
| 3361 | caacatccta aatggaaaaa ataggatatt ccataataaa gccaaattta aacaatatct |
| 3421 | gtctacaaat ccatctatag aagatgacag ggcggaaaat tccaaccaaa agagtttaac |
| 3481 | tataccaaat aaaaacaaaa ggaataaaca atctcaaagc |

SEQ ID NO: 215 Mouse CD84 Isoform 2 Amino Acid Sequence (NP_001239401.1)

| | |
|---|---|
| 1 | maqrhlwiwf lclqtwseaa gkdadpvvmn gilqesvtfl lniqepkkid niawtsqssv |
| 61 | afikpgvnka evtitqgtyk grieiidqky dlvirdlrme dagtykadin eeneetitki |
| 121 | yylhiyrklw qhgaldllli |

SEQ ID NO: 216 Mouse CD84 Transcript Variant 3 cDNA Sequence
(NM_001289470.1; CDS: 180-1166)

| | |
|---|---|
| 1 | agtgcttgga gttcctctgt gactgaccac ttcttccttt tctgtctaat ggtgaacacc |
| 61 | tttctggacc agctctggac cagaatctga tttatgctct gctccggaaa caccacactg |
| 121 | aagtgaaagc agctaccaca ccagttattt ttcctcagaa gactggagtc tgactggaca |
| 181 | tggcccagcg ccatctgtgg atctggttcc tttgcctaca aacctggtct ccagcagcag |
| 241 | gaaaagatgc agacccggtg gtaatgaatg ggattattgg ggagtcagtt actttcctct |
| 301 | taaatattca agaaccaaag aaaattgaca acattgcctg gacttctcaa tcatctgttg |
| 361 | cttttataaa accaggagtc aataaagctg aagttaccat aacccagggc acttataaag |
| 421 | gacgaataga aatcatagat cagaagtatg acctggtcat tagagacctg aggatggaag |
| 481 | atgcaggaac ttacaaagca gacatcaatg aagagaatga ggaaaccatc accaagatct |
| 541 | actaccttca tatctaccgt cgacttaaaa caccaaaaat tacacagagt ttgatatcat |
| 601 | ctttgaacaa tacctgtaat atcacactga catgctctgt ggaaaaggaa gaaaaggatg |
| 661 | tcacatatag ctggagtccc tttggagaga aaagcaatgt ccttcaaatc gtccactccc |
| 721 | ccatggacca aaaactgacc tacacatgta cagcccagaa ccctgtcagc aacagttctg |
| 781 | actctgtcac tgtccagcag ccatgtacag acactccaag cttccatcct cgccatgctg |
| 841 | tgttgccagg aggattggcc gtgctctttc tgcttattct cattccgatg ttggcatttc |
| 901 | tgttccgttt gtataagaga aggcgagaca ggattgtcct ggaagatgat gtctcaaaga |
| 961 | aaacagtata tgctgtagtt tcaagaaatg ctcaacccac agagtccaga atctatgatg |
| 1021 | aaatccctca gtccaagatg ctgtcctgta agaaagatcc ggtgaccacc atttattcct |
| 1081 | cagtgcagct ttctgagaag atgaaggaaa ccaacatgaa ggacagaagt ctgcctaagg |
| 1141 | ctttgggtaa tgaaattgtt gtctaggtga ttctctaaga ccacgaagga cacaaggaca |
| 1201 | agtcatctat gaggattgaa tcaacggttt cagtcttttg gatataacct gggccagcca |
| 1261 | agggatttag gaatgaagca agctccgtgg gtagaggtct gatccccagt gtgtaatgtt |
| 1321 | aggggccatg tacaggattg actctcaggc ccacagatct ttacccagag aaaccctgac |
| 1381 | ctgctcccat gctgtttttc ctggggaaag gaccctaggg cactcaacct ttatgcaatc |
| 1441 | agacatgcct ctcagagact gtctaacagc ttccagacta atctctgtgc agtacttagt |
| 1501 | cttacaactc tcacgggcaa cggcttcaag ttccaatttt acgatgtgtc tagcctggga |
| 1561 | tgactgttta gtttctaatg tggcgagaat gtatgttacc atgtaggaag cacagactat |
| 1621 | ggcaatctat aaatgatttg tggcatgaga ctgatgtccg aatttagggg aaggggaatg |
| 1681 | gtcttactta ggcattttat ggaaattgag tctctctccc cgagaagagg gtgatgaagc |
| 1741 | agcatccacg tctgcctctt ctccagtaac ctgcttgtta tcgacaatgt ccagccgatg |
| 1801 | gtaatgaact gaaacaaatg cgcttgaaag agatgaatca atttgagatt taacaaatcg |
| 1861 | ggtcaatttc tgaaatgccc aaggaccgaa ggagatcaat aataggagtc ccaatagggg |
| 1921 | ccctaaaagg gagggcaaca aggttgaaag tcagggggag gttgaaaacc agttttggta |
| 1981 | gtctaccttc cccctaggcc attgtaaata cttgtgtatg ggtgtaactc agctatctat |
| 2041 | agttctaagt atccactctg gttcctcttt aggtcttaaa cttccttctt cctagttgat |
| 2101 | ggtaaattcc tgtgtaaggc agtggcctag cttttattca aagtgatagt gtaatgccag |
| 2161 | aggctattct gaatgtcact gaataggcaa cactctccct gaattctaag tccatggtct |
| 2221 | gttcaagggc tttttaggac attggaacac cagtgaaggc ttagctatgt cagaattcaa |
| 2281 | tcttaaaatg cacttataat aagataatat taaaagagag cacatggatc tatacaccag |
| 2341 | actaactcgg gaatagaata tgagtacaaa atgggcagta tgcagctgct gaactaaggc |
| 2401 | tgtggtagat accttttcaa agtttgcctt cccagatttt taaaccaagg atcgtttcct |
| 2461 | aactctaata ggcagcaaaa cgtaagcagg tctctaacaa aaacataaca gtagattcct |
| 2521 | tatctaaatt aggatctaca caattagtta attgacaaga attacaatga atataaaaag |
| 2581 | acttgccaag attggcgatc ttaactctta aaattatcta acaataagca tataggtaag |
| 2641 | gtacacaaac tttcatagct ataaggagct gacctgaaag gccaaaaaca gtgtctctga |
| 2701 | caaaagcatc ttgtacattc tctgtaccag tctttttgcc tcatgagtca gcttttttag |
| 2761 | ttgtttttat tttaagttgg caccaggttg gtactccttg ctgcagccca tggcggagat |
| 2821 | acgaagtttc tttatctgtt tgtaagtggc tgctctctga tttctcttct tttgtatact |
| 2881 | caacatagct ttctggtcac cactgtcagg gcactcacag gtcacaggtc agcctgtcac |
| 2941 | attggaagct agcatgctct tgtagcattc tgtggaaaaa acagaaacat tctccctttt |
| 3001 | ccccatatta agtatctgaa caggatcatg gcaagtgcca ataagtggat cctttttatc |
| 3061 | tgtcctagac atcattatat ctagtttgtt ttttttttgt aaataaaaat gtgattttat |
| 3121 | gtgcacaggg atataattcc taccttcttt gtttttaaag aaggtatagt ttttaaagtt |
| 3181 | ttacaatacc ttgtctttga gaattataaa atatctcagt aacatgtgta acattaaatt |
| 3241 | gttaacaaaa catctcttgg aggttttgaa tataaaaatt ttgaagc |

SEQ ID NO: 217 Mouse CD84 Isoform 3 Amino Acid Sequence (NP_001276399.1)

| | |
|---|---|
| 1 | maqrhlwiwf lclqtwseaa gkdadpvvmn gilgesvtfl lniqepkkid niawtsqssv |
| 61 | afikpgvnka evtitqgtyk grieiidqky dlvirdlrme dagtykadin eeneetitki |
| 121 | yylhiyrrlk tpkitqslis slnntcnitl tcsvekeekd vtyswspfge ksnvqqivhs |
| 181 | pmdqkltytc taqnpvsnss dsvtvqqpct dtpsfhprha vlpgglavif llilipmlaf |
| 241 | lfrlykrrrd rivleddvsk ktvyavvsrn aqptesriyd eipqskmlsc kkdpvttiys |
| 301 | svqlsekmke tnmkdrslpk algneivv |

*The nucleic acid and polypeptide sequences of the biomarkers encompassed by the present invention listed in Table 2 have been submitted at GenBank under the unique identifier provided herein and each such uniquely identified sequence submitted at GenBank is hereby incorporated in its entirety by reference.
*included in Table 2 are RNA nucleic acid molecules e.g., thymidines replaced with uridines), nucleic acid molecules encoding orthologs of the encoded proteins, as well as DNA or RNA nucleic acid sequences comprising a nucleic acid sequence having at least 80%, 81%, 87%, 83%, 84%, 85%, 86%, 87%, 88%, 89%, 90%, 91%, 92%, 93%, 94%, 95%, 96%, 97%, 98%, 99%, 99.5%, or more identity across their full length with the nucleic acid sequence of any publicly available sequence listed in Table 2, or a portion thereof Such nucleic acid molecules can have a function of the full-length nucleic acid as described further herein.
*Included in Table 2 are orthologs of the proteins, as well as polypeptide molecules comprising an amino acid sequence having at least 80%, 81%, 82%, 83%, 84%, 85%, 86%, 87%, 88%, 89%, 90%, 91%, 92%, 93%, 94%, 95%, 96%, 97%, 98%, 99%, 99.5%, or more identity across their full length with an amino acid sequence of any publicly available sequence listed in Table 2, or a portion thereof. Such polypeptides can have a function of the full-length polypeptide as described further herein.
*Included in Table 2 are additional known nucleic acid and amino acid sequences for the listed biomarkers.

### IV. Agents Useful for Modulating Targets and Biomarkers

[0259] It is demonstrated herein that the inflammatory phenotype of monocytes and/or macrophages can be controlled by modulating the copy number, amount, and/or activity of certain biomarkers (e.g., at least one target listed in Table 1 and/or Table 2), either alone or in combination and that the modulation of the inflammatory phenotype can modulate immune responses. Thus, the present invention provides compositions that modulate the copy number, amount, and/or activity of at least one biomarker (e.g., at least one target listed in Table 1 and/or Table 2) can upregulate or downregulate the inflammatory phenotype and, thereby, upregulate or downregulate, respectively, an immune response. Agents are also described herein that can detect the copy number, amount, and/or activity of the at least one biomarker (e.g., at least one target listed in Table 1 and/or Table 2), such that the agents are useful for diagnosing, prognosing, and screening effects mediated by the at least one biomarker (e.g., at least one target listed in Table 1 and/or Table 2).

[0260] An agent that downregulates the copy number, amount, and/or activity of at least one target listed in Table 1, such as by agents that downregulate the at least one target like antibodies, siRNAs, and the like described herein, can increase the inflammatory phenotype of monocytes and/or macrophages.

[0261] An agent that downregulates the copy number, amount, and/or activity of at least one target listed in Table 2, such as agents that downregulate the at least one target like antibodies, siRNAs, and the like described herein, can decrease the inflammatory phenotype of monocytes and/or macrophages.

[0262] Any agent that modulates the at least one biomarker described herein (e.g., at least one target listed in Table 1 and/or Table 2) is encompassed by the present invention. The agent can modulate genetic sequence, copy number, gene expression, translation, post-translational modification, subcellular localization, degradation, conformation, stability, secretion, enzymatic activity, transcription factors, receptor activation, signal transduction, and other biochemical functions mediated by the at least one biomarker.

[0263] The agent can bind any cell moiety, such as a receptor, a cell membrane, an antigenic determinant, or other binding site present on a target molecule or a target cell. In some embodiments, the agent can diffuse or be transported into the cell, where it can act intracellularly. In some embodiments, the agent is cell-based.

[0264] As described further below, representative agents include, without limitation, nucleic acids (DNA and RNA), oligonucleotides, polypeptides, peptides, antibodies, fusion proteins, antibiotics, small molecules, lipids/fats, sugars, vectors, conjugates, vaccines, gene therapy agents, cell therapy agents, and the like, such as a small molecule, mRNA encoding a polypeptide, CRISPR guide RNA (gRNA), RNA interfering agent, small interfering RNA (siRNA), CRISPR RNA (crRNA and tracrRNA), a small hairpin RNA (shRNA), a microRNA (miRNA), a piwi-interacting RNA (piRNA), antisense oligonucleotide, peptide or peptidomimetic inhibitor, aptamer, natural ligands and derivative thereof that bind and either activate or inhibit protein biomarkers, antibody, intrabody, or cells, either alone or in combination with other agents.

[0265] In some embodiments, agents that modulate the interaction between at least one biomarker (e.g., at least one target listed in Table 1 and/or Table 2) and a natural binding partner are useful according to the present invention. For example, in one embodiment, agents which directly block an interaction(s) between a biomarker and one or more of its natural binding partners (e.g., blocking antibodies) can modulate biomarker activity and thereby modulate inflammatory phenotype. Alternatively, agents that indirectly block the interaction(s) are useful. For example, a soluble protein, by binding to a biomarker natural binding partner or, alternatively, by mimicking the natural binding partner of the biomarker indirectly reduces the effective concentration of biomarker and/or biomarker natural binding partner available to bind to the respective protein on cells. Exemplary agents include antibodies against the biomarker or natural binding partner(s) of the biomarker that block the interaction between the biomarker and the natural binding partner(s); a non-activating form of the biomarker and/or natural binding partner(s) of the biomarker (e.g., a dominant negative polypeptide), small molecules or peptides that block the interaction between the biomarker and natural binding partner(s) thereof; fusion proteins (e.g., the extracellular portion of the biomarker and/or natural binding partner(s) thereof fused to the Fc portion of an antibody or immunoglobulin) that inhibit the interaction between the biomarker and natural binding partner(s) thereof; nucleic acid molecules and/or genetic modifications that block transcription or translation of the biomarker and/or the natural binding partner(s) thereof; a non-activating form of a biomarker and/or natural binding partner(s) thereof.

[0266] In other exemplary embodiments, agents that promote the binding of a biomarker (e.g., one or more targets listed in Table 1 and/or Table 2) to one or more natural binding partners are encompassed by the present invention. Agents that modulate such an interaction can do so either directly or indirectly. Thus, in one embodiment, agents which directly enhance the interaction between a biomarker and natural binding partner(s) of the biomarker are useful modulatory agents. Alternatively, agents that block binding of a biomarker and/or natural binding partner(s) of the biomarker to other binding partners increase the effective concentration of the two components available to bind to each other. Exemplary agents include antibodies against a biomarker and/or natural binding partner(s) thereof, small molecules, and peptides that activate or promote the interaction between the biomarker and natural binding partner(s) thereof.

[0267] Agents encompassed by the present invention can comprise any number, type, and modality. For example, agents can comprise 1, 2, 3, 4, 5, or more, or any range in between, inclusive, number of agents that modulates a biomarker or more than on biomarker (e.g., 2 agents that modulate the same target listed in Table 1 or Table 2, one agent that modulates a target listed in Table 1 and a second agent that modulates a target listed in Table 2, a combination of an siRNA and an antibody agent that modulates a target listed in Table 2, a combination of two siRNAs that modulates a single target listed in Table 1 along with a single siRNA that modulates a single target listed in Table 2 and an antibody agent that modulates a different target listed in Table 2, etc.).

[0268] In some embodiments, modulatory agents encompassed by the present invention further comprise one or more additional agents that target phagocytes, e.g., monocytes and/or macrophages. Such monocyte/macrophage targeting agents include, but are not limited to, rovelizumab which targets CD11b, small molecules, including NRP1685A (which targets Neurophilin-1), nesvcumab targeting ANG2, pascolizumab specific to IL-4, dupilumab specific to IL4Rα, tocilizumab and sarilumab specific to IL-6R, adalimumab, certolizumab, tanercept, golimumab, and infliximab specific to TNF-α, and CP-870 and CP-893 targeting CD40.

[0269] In addition to agents described below and herein, exemplary agents for modulating biomarkers of interest encompassed by the present invention are described in the art (see, e.g., (i) a co-pending application filed by Novobrantseva et al. (Verseau Therapeutics, Inc.) on Jun. 4, 2019 as U.S. Ser. No. 62/857,169 having the title “Anti-PSGL-1 Compositions and Methods for Modulating Monocyte and Macrophage Inflammatory Phenotypes and Uses Thereof;” (ii) a co-pending application filed by Novobrantseva et al. (Verseau Therapeutics, Inc.) on Jun. 27, 2019 as U.S. Ser. No. 62/867,569 having the title “Anti-PSGL-1 Compositions and Methods for Modulating Monocyte and Macrophage Inflammatory Phenotypes and Uses Thereof;” (iii) a co-pending application filed by Novobrantseva et al. (Verseau Therapeutics, Inc.) on Jun. 4, 2019 as U.S. Ser. No. 62/857,194 having the title “Anti-SIGLEC-9 Compositions and Methods for Modulating Monocyte and Macrophage Inflammatory Phenotypes and Uses Thereof;” (iv) a co-pending application filed by Novobrantseva et al. (Verseau Therapeutics, Inc.) on Jun. 27, 2019 as U.S. Ser. No. 62/867,577 having the title “Anti-SIGLEC-9 Compositions and Methods for Modulating Monocyte and Macrophage Inflammatory Phenotypes and Uses Thereof;” (v) a co-pending application filed by Novobrantseva et al. (Verseau Therapeutics, Inc.) on Jun. 27, 2019 as U.S. Ser. No. 62/867,593 having the title “Anti-LRRC25 Compositions and Methods for Modulating Monocyte and Macrophage Inflammatory Phenotypes and Uses Thereof;” and (vi) a co-pending application filed by Novobrantseva et al. (Verseau Therapeutics, Inc.) on Jun. 27, 2019 as U.S. Ser. No. 62/867,602 having the title “Anti-CD53 Compositions and Methods for Modulating Monocyte and Macrophage Inflammatory Phenotypes and Uses Thereof;” the entire contents of each of said applications being incorporated herein in their entirety by this reference).

[0270] 1. Nucleic Acid Agents

[0271] One aspect encompassed by the present invention involves the use of nucleic acid molecules. Nucleic acid molecules can be deoxyribonucleic acid (DNA) molecules (e.g., cDNA, genomic DNA, and the like), ribonucleic acid (RNA) molecules (e.g., mRNA, long non-coding RNA, small RNA species, and the like), DNA/RNA hybrids, and analogs of the DNA or RNA generated using nucleotide analogs. RNA agents can include RNAi (RNA interfering) agents (e.g., small interfering RNA (siRNA)), single-strand RNA (ssRNA) molecules (e.g., antisense oligonucleotides) or double-stranded RNA (dsRNA) molecules. A dsRNA molecule comprises a first strand and a second strand, wherein the second strand is substantially complementary to the first strand, and the first strand and the second strand form at least one double-stranded duplex region. The dsRNA molecule can be blunt-ended or have at least one terminal overhang. When used as agents that bind target nucleic acid sequences, nucleic acid agents encompassed by the present invention can n hybridize to any region of a target sequence, such as genomic sequence and/or mRNA sequence, including, but not limited to, the enhancer region, the promoter region, the transcriptional start and/or stop region, splice sites, the coding region, the 3′-untranslated region (3′-UTR), the 5′-untranslated region (5′-UTR), the 5′ cap, the 3′ poly adenylyl tail, or any combination thereof.

[0272] An “isolated” nucleic acid molecule is one which is separated from other nucleic acid molecules which are present in the natural source of the nucleic acid molecule. Preferably, an “isolated” nucleic acid molecule is free of sequences (preferably protein-encoding sequences) which naturally flank the nucleic acid (i.e., sequences located at the 5′ and 3′ ends of the nucleic acid) in the genomic DNA of the organism from which the nucleic acid is derived. For example, in various embodiments, the isolated nucleic acid molecule can contain less than about 5 kB, 4 kB, 3 kB, 2 kB, 1 kB, 0.5 kB or 0.1 kB of nucleotide sequences which naturally flank the nucleic acid molecule in genomic DNA of the cell from which the nucleic acid is derived. Moreover, an “isolated” nucleic acid molecule, such as a cDNA molecule, can be substantially free of other cellular material or culture medium when produced by recombinant techniques, or substantially free of chemical precursors or other chemicals when chemically synthesized.

[0273] A nucleic acid molecule encompassed by the present invention can be isolated using standard molecular biology techniques and the sequence information in the database records described herein. Using all or a portion of such nucleic acid sequences, nucleic acid molecules encompassed by the present invention can be isolated using standard hybridization and cloning techniques (e.g., as described in Sambrook et al., ed., A Molecular Cloning: A Laboratory Manual, 4th ed., Cold Spring Harbor Laboratory Press, Cold Spring Harbor, N.Y., 2012).

[0274] A nucleic acid molecule encompassed by the present invention can be amplified using cDNA, mRNA, or genomic DNA as a template and appropriate oligonucleotide primers according to standard PCR amplification techniques. The nucleic acid molecules so amplified can be cloned into an appropriate vector and characterized by DNA sequence analysis. Furthermore, nucleic acid molecules corresponding to all or a portion of a nucleic acid molecule encompassed by the present invention can be prepared by standard synthetic techniques, e.g., using an automated nucleic acid synthesizer. Alternatively, the nucleic acid molecules can be produced biologically using an expression vector into which a nucleic acid has been sub-cloned. For example, antisense nucleic acid molecules can be cloned in an antisense orientation (i.e., RNA transcribed from the inserted nucleic acid will be of an antisense orientation to a target nucleic acid of interest as described further below).

[0275] Moreover, a nucleic acid molecule encompassed by the present invention can comprise only a portion of a nucleic acid sequence, wherein the full length nucleic acid sequence comprises a marker encompassed by the present invention or which encodes a polypeptide corresponding to a marker encompassed by the present invention. Such nucleic acid molecules can be used, for example, as a probe or primer. The probe/primer typically is used as one or more substantially purified oligonucleotides. The oligonucleotide typically comprises a region of nucleotide sequence that hybridizes under stringent conditions to at least about 7, preferably about 15, more preferably about 25, 50, 75, 100, 125, 150, 175, 200, 250, 300, 350, or 400 or more consecutive nucleotides of a biomarker nucleic acid sequence. Probes based on the sequence of a biomarker nucleic acid molecule can be used to detect transcripts or genomic sequences corresponding to one or more markers encompassed by the present invention. The probe comprises a label group attached thereto, e.g., a radioisotope, a fluorescent compound, an enzyme, or an enzyme co-factor.

[0276] Biomarker nucleic acid molecules that differ, due to degeneracy of the genetic code, from the nucleotide sequence of nucleic acid molecules encoding a protein which corresponds to the biomarker, and thus encode the same protein, are also contemplated.

[0277] In addition, it will be appreciated by those skilled in the art that DNA sequence polymorphisms that lead to changes in the amino acid sequence can exist within a population (e.g., the human population). Such genetic polymorphisms can exist among individuals within a population due to natural allelic variation. An allele is one of a group of genes which occur alternatively at a given genetic locus. In addition, it will be appreciated that DNA polymorphisms that affect RNA expression levels can also exist that can affect the overall expression level of that gene (e.g., by affecting regulation or degradation).

[0278] The term “allele,” which is used interchangeably herein with “allelic variant,” refers to alternative forms of a gene or portions thereof. Alleles occupy the same locus or position on homologous chromosomes. When a subject has two identical alleles of a gene, the subject is said to be homozygous for the gene or allele. When a subject has two different alleles of a gene, the subject is said to be heterozygous for the gene or allele. For example, biomarker alleles can differ from each other in a single nucleotide, or several nucleotides, and can include substitutions, deletions, and insertions of nucleotides. An allele of a gene can also be a form of a gene containing one or more mutations.

[0279] The term “allelic variant of a polymorphic region of gene” or “allelic variant”, used interchangeably herein, refers to an alternative form of a gene having one of several possible nucleotide sequences found in that region of the gene in the population. As used herein, allelic variant is meant to encompass functional allelic variants, non-functional allelic variants, SNPs, mutations and polymorphisms.

[0280] The term “single nucleotide polymorphism” (SNP) refers to a polymorphic site occupied by a single nucleotide, which is the site of variation between allelic sequences. The site is usually preceded by and followed by highly conserved sequences of the allele (e.g., sequences that vary in less than 1/100 or 1/1000 members of a population). A SNP usually arises due to substitution of one nucleotide for another at the polymorphic site. SNPs can also arise from a deletion of a nucleotide or an insertion of a nucleotide relative to a reference allele. Typically the polymorphic site is occupied by a base other than the reference base. For example, where the reference allele contains the base “T” (thymidine) at the polymorphic site, the altered allele can contain a “C” (cytidine), “G” (guanine), or “A” (adenine) at the polymorphic site. SNP's can occur in protein-coding nucleic acid sequences, in which case they can give rise to a defective or otherwise variant protein, or genetic disease. Such a SNP can alter the coding sequence of the gene and therefore specify another amino acid (a “missense” SNP) or a SNP can introduce a stop codon (a “nonsense” SNP). When a SNP does not alter the amino acid sequence of a protein, the SNP is called “silent.” SNP's can also occur in noncoding regions of the nucleotide sequence. This can result in defective protein expression, e.g., as a result of alternative spicing, or it can have no effect on the function of the protein.

[0281] As used herein, the terms “gene” and “recombinant gene” refer to nucleic acid molecules comprising an open reading frame encoding a polypeptide corresponding to a marker encompassed by the present invention. Such natural allelic variations can typically result in 1-5% variance in the nucleotide sequence of a given gene. Alternative alleles can be identified by sequencing the gene of interest in a number of different individuals. This can be readily carried out by using hybridization probes to identify the same genetic locus in a variety of individuals. Any and all such nucleotide variations and resulting amino acid polymorphisms or variations that are the result of natural allelic variation and that do not alter the functional activity are intended to be within the scope encompassed by the present invention.

[0282] In another embodiment, a biomarker nucleic acid molecule can be at least 7, 15, 20, 25, 30, 40, 60, 80, 100, 150, 200, 250, 300, 350, 400, 450, 550, 650, 700, 800, 900, 1000, 1100, 1200, 1300, 1400, 1500, 1600, 1700, 1800, 1900, 2000, 2200, 2400, 2600, 2800, 3000, 3500, 4000, 4500, or more nucleotides in length and hybridizes under stringent conditions to a nucleic acid molecule corresponding to a marker encompassed by the present invention or to a nucleic acid molecule encoding a protein corresponding to a marker encompassed by the present invention. The term “hybridizes under stringent conditions” is intended to describe conditions for hybridization and washing under which nucleotide sequences at least 60% (65%, 70%, 75%, 80%, preferably 85%) identical to each other typically remain hybridized to each other. Such stringent conditions are known to those skilled in the art and can be found in sections 6.3.1-6.3.6 of Current Protocols in Molecular Biology, John Wiley & Sons, N.Y. (1989). A preferred, non-limiting example of stringent hybridization conditions are hybridization in 6× sodium chloride/sodium citrate (SSC) at about 45° C., followed by one or more washes in 0.2×SSC, 0.1% SDS at 50-65° C.

[0283] In addition to naturally-occurring allelic variants of a nucleic acid molecule encompassed by the present invention that can exist in the population, the skilled artisan will further appreciate that sequence changes can be introduced by mutation thereby leading to changes in the amino acid sequence of the encoded protein, without altering the biological activity of the protein encoded thereby. For example, one can make nucleotide substitutions leading to amino acid substitutions at “non-essential” amino acid residues. A “non-essential” amino acid residue is a residue that can be altered from the wild-type sequence without altering the biological activity, whereas an “essential” amino acid residue is required for biological activity. For example, amino acid residues that are not conserved or only semi-conserved among homologs of various species can be non-essential for activity and thus would be likely targets for alteration. Alternatively, amino acid residues that are conserved among the homologs of various species (e.g., murine and human) can be essential for activity and thus would not be likely targets for alteration.

[0284] Accordingly, another aspect encompassed by the present invention encompasses nucleic acid molecules encoding a polypeptide encompassed by the present invention that contain changes in amino acid residues that are not essential for activity. Such polypeptides differ in amino acid sequence from the naturally-occurring proteins which correspond to the markers encompassed by the present invention, yet retain biological activity. In one embodiment, a biomarker protein has an amino acid sequence that is at least about 40%/identical, 50%, 60%, 70%, 75%, 80%, 83%, 85%, 87.5%, 90%, 91%, 92%, 93%, 94%, 95%, 96%, 97%, 98%, 99% or identical to the amino acid sequence of a biomarker protein described herein.

[0285] An isolated nucleic acid molecule encoding a variant protein can be created by introducing one or more nucleotide substitutions, additions or deletions into the nucleotide sequence of nucleic acids encompassed by the present invention, such that one or more amino acid residue substitutions, additions, or deletions are introduced into the encoded protein. Mutations can be introduced by standard techniques, such as site-directed mutagenesis and PCR-mediated mutagenesis. Preferably, conservative amino acid substitutions are made at one or more predicted non-essential amino acid residues. A “conservative amino acid substitution” is one in which the amino acid residue is replaced with an amino acid residue having a similar side chain. Families of amino acid residues having similar side chains have been defined in the art. These families include amino acids with basic side chains (e.g., lysine, arginine, histidine), acidic side chains (e.g., aspartic acid, glutamic acid), uncharged polar side chains (e.g., glycine, asparagine, glutamine, serine, threonine, tyrosine, cysteine), non-polar side chains (e.g., alanine, valine, leucine, isoleucine, proline, phenylalanine, methionine, tryptophan), beta-branched side chains (e.g., threonine, valine, isoleucine) and aromatic side chains (e.g., tyrosine, phenylalanine, tryptophan, histidine). Alternatively, mutations can be introduced randomly along all or part of the coding sequence, such as by saturation mutagenesis, and the resultant mutants can be screened for biological activity to identify mutants that retain activity. Following mutagenesis, the encoded protein can be expressed recombinantly and the activity of the protein can be determined.

[0286] As described further below, some forms of nucleic acids useful according to the present invention can act as inhibitors, which refers to an agent that inhibits the function of a biological target. In some embodiments, the inhibitor is a gene silencing agent that prevents the expression of a gene or gene product. “Gene silencing” is often referred to as “gene knockdown.” Gene silencing can occur on the transcriptional level, i.e., prevent the transcription of DNA to RNA, or on the translational level, i.e., post-transcriptional silencing i.e., prevent the translation of mRNA to protein. Types of transcriptional gene silencing include genomic imprinting, paramutation, transposon silencing, histone modification, transgene silencing, position effect, and RNA-directed DNA methylation, for example. Examples of post-transcriptional gene silencing include RNA interference (RNAi), RNA silencing, and nonsense mediated decay. A gene silencing agent can be designed to silence (e.g., inhibit the expression of) a specific gene or to silence multiple genes simultaneously. A gene silencing agent can reduce the expression of a gene and/or gene product by at least about 20%, at least about 30%, at least about 40%, at least about 50%, at least about 60%, at least about 70%, at least about 80%, at least about 90%, at least about 95%, at least about 98%, at least about 99%, or at least about 100%. In some embodiments, a gene silencing agent reduces expression of a gene and/or gene product by at least about 70%.

[0287] In some embodiments, nucleic acids in genomes are useful and can be used as targets and/or agents. For example, target DNA in the genome can be manipulated using well-known methods in the art. Target DNA in the genome can be manipulated by deletion, insertion, and/or mutation are retroviral insertion, artificial chromosome techniques, gene insertion, random insertion with tissue specific promoters, gene targeting, transposable elements and/or any other method for introducing foreign DNA or producing modified DNA/modified nuclear DNA. Other modification techniques include deleting DNA sequences from a genome and/or altering nuclear DNA sequences. Nuclear DNA sequences, for example, can be altered by site-directed mutagenesis.

[0288] a. Messenger RNA (mRNA) and cDNA

[0289] In some embodiments, mRNAs and/or cDNA that encode target proteins and variants thereof can be used as agents to modulate target protein amount and/or activity of interest. mRNA and cDNA can be modified to increase the stability and/or immunogenicity, for example, codon optimization.

[0290] b. Small Interfering RNA (siRNA)

[0291] In some embodiments, a nucleic acid agent can be an RNAi (RNA interference) agent. An RNAi agent can be a single stranded RNA molecule, or a double-stranded RNA molecule such as small (or short) interfering RNA (siRNA) molecule. A siRNA molecule is a double-stranded oligonucleotide or RNA molecules having a sense strand and an antisense strand wherein the antisense strand is substantially complementary to a sequence in a target mRNA molecule. A siRNA molecule upon cellular delivery will induce RNA interference (RNAi). RNAi is a post-transcriptional mechanism of gene silencing through chromatin remodeling, inhibition of protein translation, or direct mRNA degradation. During the RNAi process, small RNA molecules such as siRNAs are recruited to the RNA-induced silencing complex (RISC). This complex is able, via the siRNA molecules, to bind to substantially complementary sequences (i.e., the mRNA of a transcribed gene) and degrade them by endonuclease activity. This leads ultimately to inhibition of expression of the corresponding gene that encodes the mRNA complementary to the siRNA molecules (e.g., McManus and Sharp (2002) Nat. Rev. Genet. 3: 737-747).

[0292] The term “double stranded RNA,” a “duplex RNA,” or a “RNA duplex” refers to an RNA of two strands and with at least one double-stranded region, and includes RNA molecules that have at least one gap, nick, bulge, loop, and/or bubble either within a double-stranded region or between two neighboring double-stranded regions. If one strand has a gap or a single-stranded region of unmatched nucleotides between two double-stranded regions, that strand is considered as having multiple fragments. A double-stranded RNA as used here can have terminal overhangs on either end or both ends. In some embodiments, the two strands of the duplex RNA can be linked through certain chemical linker.

[0293] The term “antisense strand” refers to an RNA strand that has substantial sequence complementarity against a target messenger RNA. An antisense strand can be part of a siRNA molecule, part of a miRNA/miRNA duplex, or a single-strand mature miRNA.

[0294] The sense and antisense strand of a siRNA molecule each can comprise about 10 to 50 nucleotides or nucleotide analogs. Preferably, the sense and antisense strand of the siRNA molecule each has a length from about 15-45 nucleotides. Further preferably, the antisense and the sense strand of the siRNA molecule each has a length from 18 to 30 nucleotides, or from 21 to 23 nucleotides, for example, about 18 nucleotides, about 19 nucleotides, about 20 nucleotides, about 21 nucleotides, about 22 nucleotides, about 23 nucleotides, about 24 nucleotides, about 25 nucleotides, about 26 nucleotides, about 27 nucleotides, about 28 nucleotides, about 29 nucleotides, or about 30 nucleotides.

[0295] The sense and antisense strands of a siRNA molecule form a duplex region. The antisense strand comprises (or alternatively, consists essentially of, or consists of) a nucleotide sequence that is substantially complementary to a target mRNA to mediate RNAi.

[0296] The term “substantially complementary” refers to complementarity in a based-paired and double stranded region of the siRNA molecule. The complementarity does not need to be perfect; there can be any number of base pair mismatches that do not impact hybridization under even the least stringent hybridization conditions. For example, the antisense region of the siRNA molecule encompassed by the present invention can comprise at least about 70% or greater complementary, at least about 75% or greater complementary, at least about 80% or greater complementary, or at least about 85% or greater complementary, or at least about 90% or greater complementary, or at least about 91% or greater complementary, or at least about 92% or greater complementary, or at least about 93% or greater complementary, or at least about 94% or greater complementary, or at least about 95% or greater complementary, or at least about 96% or greater complementary, or at least about 97% or greater complementary, or at least about 98% or greater complementary, or at least about 99% or greater complementary, to the nucleic acid sequence of the target mRNA molecule.b

[0297] siRNA molecules can further include at least one overhang region, wherein each overhang region has six or fewer nucleotides. For example, when the antisense and sense strands of a siRNA molecule are aligned, there are at least one, two, three, four, five or six nucleotides at the end of the strands which do not align (i.e., no complementary bases in the opposing strand). In some examples, an overhang can occur at one or both ends of the duplex when the sense and antisense strands are annealed.

[0298] In some examples, the antisense region and the sense region of the siRNA molecule can vary in lengths, sequences and the nature of chemical modifications thereto.

[0299] c. MicroRNA (miRNA) and Piwi-Interacting RNA (piRNA)

[0300] In some embodiments, nucleic acid molecules can be miRNAs, miRNA mimetics, or miRNA inhibitors. miRNAs are a class of naturally occurring, small noncoding RNA molecules 21-25 nucleotides in length that regulate gene expression post-transcriptionally and part of the cell's RNAi mechanism. miRNAs are partially complementary to messenger RNA (mRNA) molecules, and their main function is down-regulation of gene expression via translational repression, mRNA cleavage and deadenylation.

[0301] MicroRNA inhibitors are antagomirs, which can be used in the silencing of endogenous miRNAs. miRNA mimetics or mimics are miRNA agonists, and can be used to replace endogenous miRNAs as functional equivalents and thereby up-regulating pathways affected by such endogenous miRNAs.

[0302] “Piwi-interacting RNA (piRNA)” is the largest class of small non-coding RNA molecules. piRNAs form RNA-protein complexes through interactions with piwi proteins. These piRNA complexes have been linked to both epigenetic and post-transcriptional gene silencing of retrotransposons and other genetic elements in germ line cells, particularly those in spermatogenesis. They are distinct from microRNA (miRNA) in size (26-31 nt rather than 21-24 nt), lack of sequence conservation, and increased complexity. However, like other small RNAs, piRNAs are thought to be involved in gene silencing, specifically the silencing of transposons. The majority of piRNAs are antisense to transposon sequences, suggesting that transposons are the piRNA target. In mammals it appears that the activity of piRNAs in transposon silencing is most important during the development of the embryo, and in both C. elegans and humans, piRNAs are necessary for spermatogenesis. piRNA has a role in RNA silencing via the formation of an RNA-induced silencing complex (RISC).

[0303] d. Antisense Nucleic Acids and Oligonucleotides

[0304] In some embodiments, nucleic acid molecules can comprise antisense nucleic acid molecules, such as those having a sequence complementary to a target mRNA and/or complementary to the coding strand of a double-stranded cDNA. An antisense nucleic acid molecule encompassed by the present invention can hydrogen bond to (i.e. anneal with) can be complementary to an entire coding strand, or to only a portion thereof, e.g., all or part of the protein coding region (or open reading frame). An antisense nucleic acid molecule can also be antisense to all or part of a non-coding region of the coding strand of a nucleotide sequence encoding a polypeptide of interest. The non-coding regions (“5′ and 3′ untranslated regions”) are the 5′ and 3′ sequences which flank the coding region and are not translated into amino acids.

[0305] In some embodiments, nucleic acid molecules can comprise oligonucleotides, including antisense and sense oligonucleotides. Oligonucleotides are short single-strand nucleic acid molecules that upon cellular uptake can selectively inhibit the expression and function of a target protein. Antisense oligonucleotides are complementary to target mRNA and/or complementary to the coding strand of a double-stranded cDNA and typically have 10-50 nucleotides in length, preferably 15-30 nucleotides in length, more preferably 18-20 nucleotides in length. For example, the antisense oligonucleotide can comprise 18 nucleotides, or 19 nucleotides, or 20 nucleotides, or 21 nucleotides, or 22 nucleotides, or 23 nucleotides, or 24 nucleotides, or 25 nucleotides, or 26 nucleotides, or 27 nucleotides, or 28 nucleotides, or 29 nucleotides, or 30 nucleotides. Antisense oligonucleotides can form a duplex with the target mRNA and inhibit its translation or processing, consequently inhibiting protein biosynthesis. Antisense oligonucleotides are preferably designed to target the initiator codons, the transcriptional start site of the targeted gene or the intron-exon junctions. For therapeutic purpose, oligonucleotides can be used to selectively block the expression of target proteins associated with macrophages that are implicated in the diseases.

[0306] Antisense oligonucleotides can inhibit gene expression through various mechanisms: (1) degradation of the complexes between target RNA/DNA oligonucleotide by RNase H. The latter is a ubiquitous nuclear enzyme required for DNA synthesis, which functions as an endonuclease that recognizes and cleaves the RNA in the duplex. Most types of oligonucleotides, but not all, from complexes with mRNA that direct the cleavage by RNase H: (2) inhibition of translation by the ribosomal complexes; (3) competition for mRNA splicing when oligonucleotides are designed against intron-exon junctions.

[0307] e. Ribozymes and DNAzymes

[0308] In some embodiments, nucleic acid molecules can be ribozymes and DNAzymes. Ribozymes are single stranded RNA molecules retaining catalytic activities which are capable of sequence specific cleaving of RNA molecules (see, e.g., Haselhoff and Gerlach (1988) Nature 334:585-591). They function by binding to the target through antisense sequence specific hybridization and inactivating it by cleaving the phosphodiester backbone at a specific site. Their structures are based on naturally occurring site-specific, self-cleaving RNA molecules. Five classes of ribozymes have been described based on their unique characters, i.e., the Tetrahymena group I intron, RNase P, the hammerhead ribozyme, the hairpin ribozyme and the hepatitis delta virus ribozyme. Hammerhead ribozymes cleave RNA at the nucleotide sequence U-H (H=A, C or U) by hydrolysis if a 3′-5′ phosphodiester bond. Hairpin ribozymes utilize the nucleotide sequence C-U-G as their cleavage site. In some embodiments, ribozymes can be used for knocking out therapy by targeting overexpressed genes in cells of interest. A ribozyme having specificity for a nucleic acid molecule encoding a polypeptide corresponding to a marker encompassed by the present invention can be designed based upon the nucleotide sequence of a cDNA corresponding to the marker. For example, a derivative of a ltrahymena L-19 IVS RNA can be constructed in which the nucleotide sequence of the active site is complementary to the nucleotide sequence to be cleaved (see, e.g., U.S. Pat. Nos. 4,987,071 and 5,116,742). Alternatively, an mRNA encoding a polypeptide of interest can be used to select a catalytic RNA having a specific ribonuclease activity from a pool of RNA molecules (see, e.g., Bartel and Szostak (1993) Science 261:1411-1418).

[0309] DNAzymes are analogs of ribozymes with greater biological stability in which the RNA backbone is replaced by DNA motifs that confer improved biological stability.

[0310] f. Aptamers

[0311] In some embodiments, nucleic acid molecules can be aptamers. DNA or RNA aptamers are double stranded (i.e. DNA aptamers) or single stranded (i.e., RNA aptamers) nucleic acid segments that can directly interact with target proteins and interfere their activities. Generally, “aptamers” are oligonucleotide or peptide molecules that bind to a specific target molecule. “Nucleic acid aptamers” are nucleic acid species that have been engineered through repeated rounds of in vitro selection or equivalently, SELEX (systematic evolution of ligands by exponential enrichment) to bind to various molecular targets such as small molecules, proteins, nucleic acids, and even cells, tissues and organisms. “Peptide aptamers” are artificial proteins selected or engineered to bind specific target molecules. These proteins consist of one or more peptide loops of variable sequence displayed by a protein scaffold. They are typically isolated from combinatorial libraries and often subsequently improved by directed mutation or rounds of variable region mutagenesis and selection. The “Affimer protein”, an evolution of peptide aptamers, is a small, highly stable protein engineered to display peptide loops which provides a high affinity binding surface for a specific target protein. It is a protein of low molecular weight, 12-14 kDa, derived from the cysteine protease inhibitor family of cystatins. Aptamers are useful in biotechnological and therapeutic applications as they offer molecular recognition properties that rival that of the commonly used biomolecule, antibodies. In addition to their discriminate recognition, aptamers offer advantages over antibodies as they can be engineered completely in a test tube, are readily produced by chemical synthesis, possess desirable storage properties, and elicit little or no immunogenicity in therapeutic applications. In some embodiments, aptamers can be used to modulate the molecular functions of the target proteins of macrophages as implicated in the diseases. In some instances, aptamers are preferred over antibodies in protein inhibition owing to their specificity and affinity to the target protein, non-immunogenicity, and stability of pharmaceutical formulations.

[0312] g. Nucleic Acid Decoys

[0313] In some embodiments, nucleic acid molecules can be decoy DNAs or decoy RNAs. Nucleic acid decoys are particularly useful for targeting transcription factors. RNA decoys are specifically designed small RNA molecules to provide alternate, competing binding sites for proteins that act as translational activators or mRNA stabilizing elements. RNA decoys can be used to prevent translation or induce instability and, ultimately destruction of the mRNA molecules. In some examples, overexpressed short RNA molecules corresponding to critical cis-acting regulatory elements can be used as decoys for trans-activating proteins, thus preventing binding of these trans-activators to their corresponding cis-acting elements.

[0314] In other examples, decoys can be double-stranded nucleic acid molecules (e.g., DNA) with high binding affinity for the targeted proteins particularly, transcription factors which are sequence-specific double-stranded DNA binding proteins which modulate (increase or decrease) the rate of transcription of one or more specific genes in the macrophage.

[0315] h. Nucleic Acid Chimeras

[0316] In some embodiments, nucleic acid molecules can be nucleic acid chimeras. Nucleic acid chimeras are conjugates of different types of nucleic acid molecules which are designed to modulate the macrophage associated target protein. For example, a conjugate of cell internalizing DNA or RNA aptamers that bind to cell surface receptors as carriers and siRNA molecules (or miRNAs) specific to a target protein can be used an approach for macrophage regulation. The aptamer-siRNA chimeras can improve the delivery and therapeutic effect.

[0317] i. Triple Helical Structures

[0318] In some embodiments, nucleic acid molecules encompassed by the present invention can form triple helical structures. For example, expression of a protein of interest can be inhibited by targeting nucleotide sequences complementary to the regulatory region of the gene encoding the polypeptide (e.g., the promoter and/or enhancer) to form triple helical structures that prevent transcription of the gene in target cells (see, e.g., Helene (1991) Anticancer Drug Des. 6:569-584; Helene (1992) Ann. N.Y. Acad. Sci. 660:27-36, Maher (1992) Bioassays 14:807-815). Such nucleic acids can bind to DNA duplexes through specific interactions in the major groove of the double helix.

[0319] j. Nucleic Acid Modifications and Variants

[0320] In some embodiments, nucleic acid molecules encompassed by the present invention can contain one or more chemical modifications. The modifications will not compromise the activity of the nucleic acid molecules. Chemical modifications well-known in the art are capable of increasing stability, availability, and/or cell uptake of the nucleic acid molecules. In one embodiment, modifications can be used to provide improved resistance to degradation (by nucleases) or improved uptake of nucleic acid molecules by cells. In some embodiments, modified nucleic acid molecules encompassed by the present invention can have an enhanced target efficiency as compared to corresponding non-modified nucleic acid molecules.

[0321] In some embodiments, nucleic acid molecules encompassed by the present invention can be optimized, such as to increase expression, improve the effectiveness of gene silencing for use to silence a target gene, and the like. In another embodiment, modifications can be used to increase or decrease affinity for the complementary nucleotides in the target mRNA and/or in the complementary siRNA strand. In some embodiments, siRNAs encompassed by the present invention can be modified to increase the ability to avoid or modulate an immune response in a cell, tissue or organism.

[0322] In some embodiments, nucleic acid molecules encompassed by the present invention can be further modified to increase the membrane penetrance and/or delivery to a target organ, tissue and cell. In one example, the nucleic acid molecule can be modified to increase its delivery to myeloid cells, monocytes and macrophages. For example, nucleic acid molecules can be modified such that they specifically bind to receptors or antigens expressed on a selected cell surface, e.g., by linking the antisense nucleic acid molecules to peptides or antibodies which bind to cell surface receptors or antigens. The nucleic acid molecules can also be modified as part of vectors that target cells of interest and/or selectively express within cells of interest.

[0323] Duplex molecules encompassed by the present invention, such as siRNA molecules, can comprise a modified sense strand, a modified anti-sense strand, or modified sense and antisense strands.

[0324] In some embodiments, a nucleic acid molecule encompassed by the present invention can be an α-anomeric nucleic acid molecule. An α-anomeric nucleic acid molecule forms specific double-stranded hybrids with complementary RNA in which, contrary to the usual α-units, the strands run parallel to each other (Gaultier et al. (1987) Nucleic Acids Res. 15:6625-6641). The antisense nucleic acid molecule can also comprise a 2′-o-methylribonucleotide (Inoue et al. (1987) Nucleic Acids Res. 15:6131-6148) or a chimeric RNA-DNA analogue (Inoue et al. (1987) FEBS Lett. 215:327-330).

[0325] Nucleic acid molecules encompassed by the present invention can be modified at the 5′ end, 3′ end, 5′ and 3′ end, and/or at internal residues, or any combination thereof. As described herein, a naturally occurring nucleic acid with repeating nucleotide residues has a backbone consisting of sugars and phosphodiesters, and nitrogenous bases (often called nucleobases or simply bases). Accordingly chemically modified nucleotides can include modified nucleobases, modified sugars and/or non-phosphodiester linkages (i.e., backbone modifications). In some embodiments, the modification is a mixture of different kinds of modifications described herein, such as a combination of unlocked nucleomonomer agents (UNAs), modified cap structures, modified inter-nucleoside linkages and or nucleobase modifications.

[0326] In some embodiments, nucleic acid molecules encompassed by the present invention can further comprise at least one terminal modification or “cap.”

[0327] For example, the cap can be a 5′ and/or a 3′-cap structure. The terms “cap” and “end-cap” include chemical modifications at either terminus of each strand of the nucleic acid molecule (with respect to terminal ribonucleotides), and/or modifications at the linkage between the last two nucleotides at the 5′ end and/or the last two nucleotides at the 3′ end. The cap structure can increase resistance of the nucleic acid molecule to exonucleases without compromising molecular interactions with target mRNAs or cellular machinery. Such modifications can be selected on the basis of their increased potency in vitro or in vivo.

[0328] The cap can be present at the 5′-terminus (5′-cap) or at the 3′-terminus (3′-cap) or can be present at both ends. In certain embodiments, the 5′- and/or 3′-cap is independently selected from phosphorothioate monophosphate, abasic residue (moiety), phosphorothioate linkage, 4′-thio nucleotide, carbocyclic nucleotide, phosphorodithioate linkage, inverted nucleotide or inverted abasic moiety (2′-3′ or 3′-3′) (e.g., Invabasic X, Abasic II, rSpacer/RNA abasic), and dSpacer), phosphorodithioate monophosphate, and methylphosphonate moiety. The phosphorothioate or phosphorodithioate linkage(s), when part of a cap structure, are generally positioned between the two terminal nucleotides at the 5′ end and the two terminal nucleotides at the 3′ end.

[0329] In some embodiments, nucleic acid molecules encompassed by the present invention have at least one terminal phosphorothioate monophosphate. The phosphorothioate monophosphate can be at the 5′ and/or 3′ end of each strand of the nucleic acid molecule. In other embodiments, the nucleic acid molecule has terminal phosphorothioate monophosphate at both 5′ and 3′ terminus of the sense and/or antisense strand. The phosphorothioate monophosphate can support a higher potency by inhibiting the action of exonucleases.

[0330] In some embodiments, modifications at the 5′ end is preferred in the sense strand, and comprises, for example, a 5′-propylamine group. Modifications to the 3′ OH terminus are in the sense strand, antisense strand, or in the sense and antisense strands. A 3′ end modification comprises, for example, 3′-puromycin, 3′-biotin and the like.

[0331] Terminal modifications can also be useful for monitoring distribution, and in such cases the preferred groups to be added include fluorophores, e.g., fluorescein or an Alexa dye, e.g., Alexa 488. Terminal modifications can also be useful for enhancing uptake, useful modifications for this include targeting ligands. Terminal modifications can also be useful for cross-linking an oligonucleotide to another moiety; modifications useful for this include mitomycin C, psoralen, and derivatives thereof. Exemplary 5′-modifications include, but are not limited to, 5′-monophosphate ((HO)₂(O)P-O-5′); 5′-diphosphate ((HO)₂(O)P—O—P(HO)(O)—O-5′); 5′-triphosphate ((HO)₂(S)P—O—(HO)(O)P—O—P(HO)(O)-5′); 5′-monothiophosphate (phosphorothioate; (HO)₂(S)P—O-5′); 5′-monodithiophosphate (phosphorodithioate; (HO)(HS)(S)P—O-5′), 5′-phosphorothiolate ((HO)2(O)P—S-5′); 5′-alpha-thiotriphosphate; 5′-beta-thiotriphosphate; 5′-gamma-thiotriphosphate; 5′-phosphoramidates ((HO)₂(O)P—NH-5′, (HO)(NH₂)(O)P—O-5′). Other 5′-modification include 5′-alkylphosphonates (R(OH)(O)P—O-5′, R=alkyl, e.g., methyl, ethyl, isopropyl, propyl, etc.), 5′-alkyletherphosphonates (R(OH)(O)P—O-5′, R=alkylether, e.g., methoxymethyl (CH₂OMe), ethoxymethyl, etc.).

[0332] In some embodiments, the cap at the terminus of the nucleic acid molecule can be a conjugate, for example, a 5′ conjugate. The 5′ end conjugates can inhibit 5′ to 3′ exonucleolytic cleavage (e.g., naproxen; ibuprofen; small alkyl chains; aryl groups; heterocyclic conjugates; modified sugars (D-ribose, deoxyribose, glucose etc.)).

[0333] In some embodiments, nucleic acid molecules encompassed by the present invention can include base modifications and/or substitutions of natural nucleobases.

[0334] The term “unmodified” or “natural” nucleobases include the purine bases adenine (A) and guanine (G), and the pyrimidine bases thymine (T), cytosine (C) and uracil (U). In some embodiments, nucleic acid molecules can comprise one or more nucleobase-modified nucleotides. It can comprise about 1, about 2, about 3, about 4, about 5, about 6, about 7, about 8, about 9, about 10, about 11, about 12, about 13, about 14, about 15, about 16, about 17, about 18, about 19, about 20, about 21, about 22, about 23, about 24, about 25, about 26, abut 27, about 28, about 29, or more nucleobase-modified nucleotides. In some examples, nucleic acid molecules can comprise about 1% to 10% modified nucleotides, or about 10% to 50% modified nucleotides. Modified bases refer to nucleotide bases such as, for example, adenine (A), guanine (G), cytosine (C), thymine (T), uracil (U), xanthine, inosine, and queuosine that have been modified by the replacement or addition of one or more atoms or groups. Some examples of types of modifications that can comprise nucleotides that are modified with respect to the base moieties include but are not limited to, alkylated, halogenated, thiolated, aminated, amidated, or acetylated bases, individually or in combination. More specific examples include, for example, 5-fluorouracil, 5-bromouracil, 5-chlorouracil, 5-iodouracil, hypoxanthine, xanthine, 4-acetylcytosine, 5-(carboxyhydroxylmethyl) uracil, 5-carboxymethylaminomethyl-2-thiouridine, 5-carboxymethylaminomethyluracil, dihydrouracil, beta-D-galactosylqueosine, inosine, N6-isopentenyladenine, 1-methylguanine, 1-methylinosine, 2,2-dimethylguanine, 2-methyladenine, 2-methylguanine, 3-methylcytosine, 5-methylcytosine, N6-adenine, 7-methylguanine, 5-methylaminomethyluracil, 5-methoxyaminomethyl-2-thiouracil, beta-D-mannosylqueosine, 5′-methoxycarboxymethyluracil, 5-methoxyuracil, 2-methylthio-N6-isopentenyladenine, uracil-5-oxyacetic acid (v), wybutoxosine, pseudouracil, queosine, 2-thiocytosine, 5-methyl-2-thiouracil, 2-thiouracil, 4-thiouracil, 5-methyluracil, uracil-5-oxyacetic acid methylester, uracil-5-oxyacetic acid (v), 5-methyl-2-thiouracil, 3-(3-amino-3-N-2-carboxypropyl) uracil, (acp3)w, and 2,6-diaminopurine, 5-propynyluridine, 5-propynylcytidine, 6-methyladenine, 6-methylguanine, N,N,-dimethyladenine, 2-propyladenine, 2-propylguanine, 2-aminoadenine, 3-methyluridine, 5-methylcytidine, 5-methyluridine and other nucleotides having a modification at the 5 position, 5-(2-amino)propyl uridine, 5-halocytidine, 5-halouridine, 4-acetylcytidine, 1-methyladenosine, 2-methyladenosine, 3-methylcytidine, 6-methyluridine, 2-methylguanosine, 7-methylguanosine, 2,2-dimethylguanosine, 5-methylaminoethyluridine, 5-methyloxyuridine, deazanucleotides such as 7-deaza-adenosine, 6-azouridine, 6-azocytidine, 6-azothymidine, 5-methyl-2-thiouridine, other thio bases such as 2-thiouridine and 4-thiouridine and 2-thiocytidine, dihydrouridine, pseudouridine, queuosine, archaeosine, naphthyl and substituted naphthyl groups, any O- and N-alkylated purines and pyrimidines such as N6-methyladenosine, 5-methylcarbonylmethyluridine, uridine 5-oxyacetic acid, pyridine-4-one, pyridine-2-one, phenyl and modified phenyl groups such as aminophenol or 2,4,6-trimethoxy benzene, modified cytosines that act as G-clamp nucleotides, 8-substituted adenines and guanines, 5-substituted uracils and thymines, azapyrimidines, carboxyhydroxyalkyl nucleotides, carboxyalkylaminoalkyl nucleotides, and alkylcarbonylalkylated nucleotides. Modified nucleotides also include those nucleotides that are modified with respect to the sugar moiety, as well as nucleotides having sugars or analogs thereof that are not ribosyl. For example, the sugar moieties can be, or be based on, mannoses, arabinoses, glucopyranoses, galactopyranoses, 4′-thioribose, and other sugars, heterocycles, or carbocycles.

[0335] Exemplary modified nucleobases include, but are not limited to, other synthetic and naturally modified nucleobases such as 5-methylcytosine (5-me-C), 5-hydroxymethyl cytosine, xanthine, hypoxanthine, 2-aminoadenine, 6-methyl and other alkyl derivatives of adenine and guanine, 2-propyl and other alkyl derivatives of adenine and guanine, 2-thiouracil, 2-thiothymine and 2-thiocytosine, 5-halouracil and cytosine, 5-propynyl uracil and cytosine, 6-azo uracil, cytosine and thymine, 5-uracil (pseudouracil), 4-thiouracil, 8-halo, 8-amino, 8-thiol, 8-thioalkyl, 8-hydroxyl and other 8-substituted adenines and guanines, 5-halo, particularly 5-bromo, 5-trifluoromethyl and other 5-substituted uracils and cytosines, 7-methylguanine and 7-methyladenine, 8-azaguanine and 8-azaadenine, 7-deazaguanine and 7-daazaadenine and 3-deazaguanine and 3-deazaadenine. In some particular embodiments, nucleobase-modified nucleotides useful in the invention include, but are not limited to: 5-bromo-uridine, 5-iodo-uridine, 5-methyl-cytidine, ribo-thymidine, 2-aminopurine, 5-fluoro-cytidine, and 5-fluoro-uridine, 2,6-diaminopurine, 4-thio-uridine; and 5-amino-allyl-uridine and the like.

[0336] In some embodiments, nucleic acid molecules encompassed by the present invention can also contain nucleotides with base analogues.

[0337] The nucleobase can be naturally occurring non canon bases such as CpG islands, inosine which can base pair with C, U or A, thiouridine, dihydrouridine, queuosine, xanthine, hypoxanthine, nubularine, isoguanisine, tubercidine and wyosine. Other analogues can include fluorophores (e.g., rhodamine, fluorescein) and other fluorescent base analogues such as 2-AP (2-aminopurine), 3-MI, 6-MI, 6-MAP, pyrrolo-dC, modified and improved derivatives of pyrrolo-dC, furan-modified bases, and tricyclic cytosine family (e.g., 1,3-Diaza-2-oxophenothiazine, tC; oxo-homologue of tC, tC; 1,3-diaza-2-oxophenoxazine). Nucleobase modified nucleotides can also include universal bases. By way of example, universal bases include but are not limited to 3-nitropyrrole, 5-nitroindole, or nebularine. The term “nucleotide” is also meant to include the N3′ to P5′ phosphoramidate, resulting from the substitution of a ribosyl 3′ oxygen with an amine group. As used herein, a universal nucleobase is any modified nucleobase that can base pair with all of the four naturally occurring nucleobases without substantially affecting the melting behavior, recognition by intracellular enzymes or activity of the oligonucleotide duplex. Some exemplary universal nucleobases include, but are not limited to, 2,4-difluorotoluene, nitropyrrolyl, nitroindolyl, 8-aza-7-deazaadenine, 4-fluoro-6-methylbenzimidazle, 4-methylbenzimidazle, 3-methyl isocarbostyrilyl, 5-methyl isocarbostyrilyl, 3-methyl-7-propynyl isocarbostyrilyl, 7-azaindolyl, 6-methyl-7-azaindolyl, imidizopyridinyl, 9-methyl-imidizopyridinyl, pyrrolopyrizinyl, isocarbostyrilyl, 7-propynyl isocarbostyrilyl, propynyl-7-azaindolyl, 2,4,5-trimethylphenyl, 4-methylinolyl, 4,6-dimethylindolyl, phenyl, napthalenyl, anthracenyl, phenanthracenyl, pyrenyl, stilbenzyl, tetracenyl, pentacenyl, and structural derivatives thereof. In some embodiments, the nucleotides of the nucleic acid molecules can incorporate base analogues and modified bases that are described in U.S. Pat. Nos. 6,008,334; 6,107,039; 6,664,058; 7,678,894; 7,786,292; and 7,956,171; U.S. Pat. Publ. Nos. 2013/122,506 and 2013/0296402; carboxamido-modified bases as described in PCT Pat. Publ. No. WO 2012/061810).

[0338] In some embodiments, modified nucleic acid molecules encompassed by the present invention can comprise artificial nucleic acid analogues.

[0339] The term “artificial nucleic acid analogues” or simply “nucleic acid analogues” refers to compounds that are structurally similar to naturally occurring DNA or RNA. An analogue can have any of the phosphate backbone, sugar, or the nucleobase (i.e., G, C, T, U, and A) altered. In some embodiments, the modified nucleotide can be an unlocked nucleomonomer agent (UNA). UNAs include any monomer unit suitable for inclusion in an oligomeric or polymeric composition such as an oligonucleotide or polynucleotide and which have, in reference to nucleosides or nucleotides, an unlocked or acyclic sugar moiety. Where such UNAs are included in a larger oligomer or polymer, such larger oligomer or polymer, e.g., oligonucleotide, can also be referred to as a UNA oligomer or UNA polymer, or UNA oligonucleotide. Where a UNA is included in a standard nucleotide, such variant nucleotide is referred to as a UNA nucleotide. Where a UNA is included in a standard nucleoside, such variant nucleoside is referred to as a UNA nucleoside. UNAs can be used as substitutes for nucleosides or nucleotides in oligonucleotides. In this case, UNAs, whether the monomer or oligomer containing the monomer, have often been referred to as “unlocked nucleic acids” in the art. When referred to as an unlocked nucleic acid herein, one of skill will understand that the inventors are referring to UNAs. According to the present invention, UNAs are not naturally occurring nucleomonomer agents. In one embodiment, one or more nucleotides in the nucleic acid molecule can be replaced with one or more unlocked nucleic acid/nuclomonomer agent (UNA) moieties, including those described in, e.g., PCT Publ. WO 2015/148580. A UNA oligomer can be a chain composed of UNA monomers, as well as various nucleotides that can be based on naturally-occurring nucleosides or modified nucleotides. UNA oligomers have been reported to have reduced off-target effects as compared to counterpart oligonucleotides lacking the modifications. Other UNA modifications and uses which can be utilized in accordance with the present invention include any of those disclosed in US Publication US20150232851, U.S. Pat. No. 9,051,570, US Publication US20150232849, EP Publication EP2162538, US Publication US20150239926, US Publication US20150239834, US Publication US20150141678, International publication WO2015074085, and/or EP Publication EP2370577.

[0340] In some embodiments, artificial nucleic acid analogues with backbone analogues include, but are not limited to, a bicyclic nucleotide analogue such as locked nucleic acid (LNA), bridged nucleic acid (BNA), glycol nucleic acid (GNA), threose nucleic acid (TNA), and morpholino. The modified oligonucleotides that comprise these backbone analogues, although having a different backbone sugar, or in case of PNA, an amino acid residue in place of the ribose phosphate, still bind to RNA or DNA according to Watson and Crick pairing, but are immune to nuclease activity. LNAs are described, for example, in U.S. Pat. Nos. 6,268,490; 6,316,198; 6,403,566; 6,770,748; 6,998,484; 6,670,461; and 7,034,133; PCT Publ. No. 99/14226. Other suitable locked nucleotides that can be incorporated in the nucleic acid molecules encompassed by the present invention include those described in U.S. Pat. Nos. 6,403,566; 6,833,361; and 7,060,809. Other locked nucleic acid derivatives, such as D-oxy-LNA, α-L-oxy-LNA, β-D-amino-LNA, α-L-amino-LNA, thio-LNA, α-L-thio-LNA, seleno-LNA, methylene-LNA and β-D-ENA, can be incorporated into nucleic acid molecules encompassed by the present invention. Those LNA derivatives described in U.S. Pat. Nos. 7,569,575; 8,084,458; and 8,429,390, can also be incorporated into the nucleic acid molecules.

[0341] In some embodiments, nucleic acid molecules encompassed by the present invention can comprise one or more sugar-modified nucleotides.

[0342] It can comprise about 1, about 2, about 3, about 4, about 5, about 6, about 7, about 8, about 9, about 10, or more sugar-modified nucleotides. Sugar-modified nucleotides useful in the invention include, but are not limited to: 2′-fluoro modified ribonucleotide, 2′-OMe modified ribonucleotide, 2′-deoxy ribonucleotide, 2′-amino modified ribonucleotide and 2′-thio modified ribonucleotide. The sugar-modified nucleotide can be, for example, 2′-fluoro-cytidine, 2′-fluoro-uridine, 2′-fluoro-adenosine, 2′-fluoro-guanosine, 2′-amino-cytidine, 2′-amino-uridine, 2′-amino-adenosine, 2′-amino-guanosine or 2′-amino-butyryl-pyrene-uridine. In addition to 2′ modification of the backbone sugar, the sugar group can be modified at other positions. The sugar group can comprise two different modifications at the same carbon of the sugar. The sugar group can also contain one or more carbons that possess the opposite stereochemical configuration than that of the corresponding carbon in ribose. Thus, a nucleic acid molecule can include nucleotides containing, e.g., arabinose, as the sugar. The nucleotide can have an alpha linkage at the 1′ position on the sugar, e.g., alpha-nucleosides. The nucleotide can also have the opposite configuration at the 4′-position, e.g., C5′ and H4′ or substituents replacing them are interchanged with each other. When the CS' and H4′ or substituents replacing them are interchanged with each other, the sugar is said to be modified at the 4′ position.

[0343] The nucleic acid molecules encompassed by the present invention can also include abasic sugars, which lack a nucleobase at C-1′ or have other chemical groups in place of a nucleobase at C1′ (see, e.g., U.S. Pat. No. 5,998,203). These abasic sugars can also be further containing modifications at one or more of the constituent sugar atoms. In other embodiments, nucleic acid molecules can also contain one or more sugars that are the L isomers. In one aspect, modification to the sugar group can also include replacement of the 4′-O with a sulfur, optionally substituted nitrogen or CH2 group. In another aspect, modifications to the sugar group can also include acyclic nucleotides, wherein a C—C bond between ribose carbons is absent and/or at least one of ribose carbons or oxygen are independently or in combination absent from the nucleotide. Such acyclic nucleotides have been disclosed in U.S. Pat. Nos. 5,047,533 and 7,737,273, and U.S. Pat. Publ. No. 20130130378. It is to be understood that when a particular nucleotide is linked through its 2′-position to the next nucleotide, the sugar modifications described herein can be placed at the 3′-position of the sugar for that particular nucleotide, e.g., the nucleotide that is linked through its 2′-position. A modification at the 3′ position can be present in the xylose configuration. The term “xylose configuration”, as used herein, refers to the placement of a substituent on the C3′ of ribose in the same configuration as the 3′-OH is in the xylose sugar. The hydrogen attached to C4′ and/or C1′ of the sugar group can be replaced by substitutes as described for 2′ modification. In one example, nucleic acid molecules encompassed by the present invention can comprise 2′-fluoro modified ribonucleotide. Preferably, the 2′-fluoro ribonucleotides are in the sense and antisense strands. More preferably, the 2′-fluoro ribonucleotides are every uridine and cytidine.

[0344] In some embodiments, the internucleoside linkage groups of the nucleic acid molecules encompassed by the present invention are modified.

[0345] The internucleoside linkage modification can be within the sense strand, antisense strand, or within the sense and antisense strands. The term “internucleoside linkage group” is intended to mean a group capable of covalently coupling together two nucleobases, such as between DNA residues, between RNA residues, between DNA and RNA residues and nucleotide analogues, between two non-LNA residues, between a non-LNA residue and a LNA residue, and between two LNA residues, etc. The naturally standard linkage is the phosphodiester linkage (PO linkage), consisting of —O—P(O)₂—O— (from 5′ to 3′ end), wherein the deoxyribose/ribose sugars are joined at both the 3′-hydroxyl and 5′-hydroxyl groups to phosphate groups in ester links, also known as “phosphodiester” bonds/linker. The linker can be modified by the replacement of one or both linking oxygens (i.e., oxygens that link the phosphate to the nucleoside), with nitrogen (bridged phosphoroamidates), sulfur (bridged phosphorothioates) and carbon (bridged methylenephosphonates). In some embodiments, the phosphate linker moiety can be replaced by non-phosphorus containing linkers, e.g., dephospho-linkers. While not wishing to be bound by theory, it is believed that since the charged phosphodiester group is the reaction center in nucleolytic degradation, its replacement with neutral structural mimics should impart enhanced nuclease stability. Examples of moieties which can replace the phosphate linker include, but are not limited to, amides (for example amide-3 (3′-CH₂—C(═O)—N(H)-5′) and amide-4 (3′-CH₂—N(H)—C(═O)-5′)), hydroxylamino, siloxane (dialkylsiloxxane), carboxamide, carbonate, carboxymethyl, carbamate, carboxylate ester, thioether, ethylene oxide linker, sulfide, sulfonate, sulfonamide, sulfonate ester, thioformacetal (3′-S—CH₂—O-5′), formacetal (3′-O—CH₂—O-5′), oxime, methyleneimino, methykenecarbonylamino, methylenemethylimino (MMI, 3′-CH₂—N(CH₃)—O-5′), methylenehydrazo, methylenedimethylhydrazo, methyleneoxymethylimino, ethers (C3′-O—C5′), thioethers (C3′-S—C5′), thioacetamido (C3′-N(H)—C(═O)—CH₂—S-C5′, C3′-O—P(O)—O—SS—C5′, C3′-CH₂—NH—NH—C5′, 3′-NHP(O)(OCH₃)—O-5′ and 3′-NHP(O)(OCH₃)—O-5′ and nonionic linkages containing mixed N, O, S and CH₂ component parts.

[0346] In some embodiments, the modification of the linkage further comprises at least one of the oxygen atoms of one phosphate which is replaced or modified. In some aspects, one or both of the non-linking phosphate oxygens on the phosphate linker can be modified or replaced. The modified phosphates can include, but are not limited to, phosphonocarboxylate (in which one of the non-linking oxygen atoms has been replaced/modified with a carboxylic acid)(e.g., phosphoacetate, phosphonoformic acid, phosphoramidate); phosphorothioate (—O—P(O,S)—O—, —O—P(S)₂—O—); methylphosphonate (—O—P(OCH3)—O—), and alkyl or aryl phosphonates. As discussed herein, one or more atoms of the linkage between two successive monomers in the siRNA molecules encompassed by the present invention are modified. Illustrative examples of such linkages are —CH₂—CH₂—CH₂—, —CH₂—CO—CH₂—, —CH₂—CHOH—CH₂—, —O—CH₂—O—, —O—CH₂—CH₂—, —O—CH₂—CH═, —CH₂—CH₂—O—, —NR^{H}—, CH₂—CH₂—, —CH₂—CH₂—NR^{H}—, —CH₂—NR^{H}—CH₂—, —O—CH₂—CH₂—NR^{H}—, —NR^{H}—CO—O—, —NR^{H} CO—NR^{H}—, —NR^{H}—CS—NR^{H}—, —NR^{H} C(═NR^{H})—NR^{H}—, —NR^{H}—CO—CH₂—NR^{H}—, —O—CO—O—, —O—CO—CH₂—O—, —O—CH₂—CO—O—, —CH₂—CO—NR^{H}—, —O—O—NR^{H}—, —NR^{H}—CO—CH₂—, —O—CH₂—CO—NR^{H}—, —O—CH₂—CH₂—NR^{H}—, —CH═N—O—, —CH₂—NR^{H} O—, —CH₂—O—N═, —S—P(O)₂—O—, —S—P(O,S)—O—, —S—P(S)₂—O—, —O—P(O)₂—S—, —O—P(O,S)—S—, —S—P(O)₂—S—, —O—PO(R^{H})—O—, —O—PO(NR^{H})—O—, —O—PO(OCH₂CH₂S—R)—O—, —O—PO(BH₃)—O—, —O—PO(NHR^{H})—, —O—P(O)₂—NR^{H}—, —NR^{H}—P(O)₂—O—, —NR″—CO—O—, —NR^{H}—CO—NR^{H}—, —O—CO—O—, —O—CO—NR^{H}—, —NR^{H}—CO—CH₂—, —O—CH₂—CO—NR^{H}—, —O—CH₂—CH₂—NR^{H}—, —CO—NR^{H}CH₂, —CH₂—NR^{H}—CO—, —O—CH₂—CH₂—S—, —S—CH₂—CH₂—O—, —S—CH₂—CH₂—S—, —CH₂—SO₂—CH₂—, —CH₂—CO—NR^{H}—, —O—CH₂—CH₂—NR^{H}—CO—, —CH₂—NCH₃—O—CH₂—, —S—CH₂—CH═, —O-PO(OCH₂CH₃)—O—, —O—PO(OCH₂CH₂S—R)—O—, —O—PO(BH₃)—O—, —CH₂—S—CH₂—, —CH₂—SO—CH₂—, —CH₂—SO₂—CH₂—, —O—SO—O—, —O—S(O)₂—O—, —O—S(O)₂—CH₂—, —O—S(O)₂—NR^{H}—, —NR^{H}—S(O)₂—CH₂—, —O—S(O)₂—CH₂—, —O-P(O)₂—O—, —O—P(O,S)—O—, —O—P(S)₂—O—, —O—P(O,NR^{H})—O—, —O—PO(R″)—O—, —O—PO(CH₃)—O—, and —O—PO(N—R^{N})—O—, wherein R^{H} is selected from hydrogen and C1-alkyl.

[0347] In the context encompassed by the present invention, preferred examples include phosphate, phosphodiester (PO) linkages and phosphorothioate (PS) linkages. Phosphorodithioates have both non-bridging oxygens replaced by sulfur. The phosphorus center in the phosphorodithioates is achiral which precludes the formation of oligonucleotide diastereomers. Thus, while not wishing to be bound by theory, modifications to both non-linking oxygens, which eliminate the chiral center, e.g., phosphorodithioate formation, can be desirable in that they cannot produce diastereomer mixtures. Thus, the non-linking oxygens can be independently any one of O, S, Se, B, C, H, N, or OR (R is alkyl or aryl). In some embodiments, nucleic acid molecules encompassed by the present invention can contain one or more phosphorothioate linkages. For example, the polynucleotide can be partially phosphorothioate-linked, for example, phosphorothioate linkages can alternate with phosphodiester linkages. In certain embodiments, the oligonucleotide is fully phosphorothioate-linked. In other embodiments, the oligonucleotide has from one to seven, one to five or one to three phosphodiester linkages. Phosphorothioate linkages have been used to render oligonucleotides more resistant to nuclease cleavage. In addition to normal 5′-3′ linkage, modified oligonucleotide can have 5′-2′ linkage and those having inverted polarity wherein the adjacent pairs of nucleoside units are linked 3′-5′ to 5′-3′ or 2′-5′ to 5′-2′. Representative U.S. patents that teach modifications of internucleoside linkage groups include U.S. Pat. Nos. 5,519,126; 5,536,821; 5,541,306; 5,550,111; 5,563,253; 5,571,799; 5,587,361; 5,625,050; 5,378,825; 5,697,248 and 7,368,439. Other references that teach internucleoside linkage modifications include Mesmaeker et al. (1995) Curr. Opin. Siruct. Biol. 5:343-355; Freier and Altmann (1997) Nucl. Acids Res. 25:4429-4443; and Micklefield (2001) Curr. Med. Chem. 8:1157-1179.

[0348] In some embodiments, nucleic acid molecules encompassed by the present invention can comprise one or more backbone-modified nucleotides.

[0349] The backbone-modified nucleotide is within the sense strand, antisense strand, or within the sense and antisense strands. A normal “backbone”, as used herein, refers to the repeating alternating sugar-phosphate sequences in a DNA or RNA molecule. In naturally occurring DNA and RNA molecules, the backbone of a nucleic acid molecule includes deoxyribose/ribose sugars joined at both the 3′-hydroxyl and 5′-hydroxyl groups to phosphate groups in ester links (i.e. PO linkage). The natural phosphodiester bonds can be replaced by amide bonds but the four atoms between two sugar units are kept. Such amide modifications can increase the thermodynamic stability of duplex formed with miRNA complement (see, e.g., Mesmaeker et al. (1997) Pure Appl. Chem. 3:437-440). In some embodiments, nucleic acid molecules encompassed by the present invention can contain chemical modifications with respect to non-locked nucleotides in the sequence, such as 2′ modification with respect to 2′hydroxyl. For example, incorporation of 2′-position modified nucleotides in an siRNA molecule can increase both resistance of the oligonucleotides to nucleases and their thermal stability with complementary targets. Various modifications at the 2′ positions can be independently selected from those that provide increased nuclease resistance, without compromising molecular interactions with the target or cellular machinery. Such modifications can be selected on the basis of their increased potency in vitro or in vivo. In some embodiments, the 2′ modification can be independently selected from a number of different “oxy” or “deoxy” substituents. Examples of “oxy”-2′ hydroxyl group modifications include alkoxy or aryloxy (e.g., Omethyl, R═H, alkyl, cycloalkyl, aryl, aralkyl, heteroaryl or sugar; polyethyleneglycols (PEG), O(CH₂CH₂O)ₙCH₂CH₂OR (n=1-50); O-AMINE or O—(CH₂)ₙAMINE (n=1-10), AMINE=NH₂; alkylamino, dialkylamino, heterocyclyl, arylamino, diaryl amino, heteroaryl amino, diheteroaryl amino, ethylene diamine or poyamino; and O—CH₂CH₂(NCH₂CH₂NMe₂)₂). “Deoxy” modifications include hydrogen (i.e., deoxyribose sugars, which are of particular relevance to the single-strand overhangs); halo (e.g., fluoro); amino (e.g., NH₂; alkylamino, dialkylamino, heterocyclyl, arylamino, diaryl amino, heteroaryl amino, diheteroaryl amino, or amino acid; NH(CH₂CH₂NH)ₙCH₂CH₂-AMINE (AMINE=NH₂; alkylamino, dialkylamino, heterocyclyl, arylamino, diaryl amino, heteroaryl amino, or diheteroaryl amino; —NHC(O)R(R=alkyl, cycloalkyl, aryl, aralkyl, heteroaryl or sugar); cyano; mercapto; alkyl-thio-alkyl; thioalkoxy; thioalkyl; alkyl; cycloalkyl; aryl; alkenyl and alkynyl.

[0350] Substantially all, or all, nucleotide 2′ positions of the non-locked nucleotides can be modified in certain embodiments. For example, the 2′ modifications can each be independently selected from O-methyl and fluoro. In exemplary embodiments, purine nucleotides each have a 2′O-methyl and pyrrolidine nucleotides each have a 2′-F. In accordance with the present invention, 2′ position modifications can also include small hydrocarbon substituents. The hydrocarbon substituents include alkyl, alkenyl, alkynyl, and alkoxyalkyl, where the alkyl (including the alkyl portion of alkoxy), alkyl and alkyl can be substituted or unsubstituted. The alkyl, alkenyl, and alkynyl can be C1 to C10 alkyl, alkenyl or alkynyl, such as C1, C2, or C3. The hydrocarbon substituents can include one or two or three non-carbon atoms, which can be independently selected from N, O, and/or S. The 2′ modifications can further include the alkyl, alkenyl, and alkynyl as O-alkyl, O-alkenyl, and O-alkynyl. Exemplary 2′ modifications in accordance with the invention include 2′-H, 2′-O-alkyl (C1-3alkyl, such as 2′O-Methyl or 2′OEt), 2′-O-methoxyethyl (2′-0-MOE), 2′-O-aminopropyl (2′-O-AP), 2′-O-dimethylaminoethyl (2′-O-DMAOE), 2′-O-dimethylaminopropyl (2′-O-DMAP), 2′-O-dimethyiaminoethyioxyethyl (2′-O-DMAEOE), 2′-O—N-methylacetamido (2′-O-NMA) or gem 2′-OMe/2′F substitutions. In some embodiments, nucleic acid molecules encompassed by the present invention contains at least one 2′ position modified as 2′O-Methoxy (2′-OMe) in non-locked nucleotides. The oligonucleotide can contain from 1 to about 5 2′—O-Methoxy (2′-OMe) modified nucleotides, or from 1 to about 3 2′-O-Methoxy (2′-OMe) modified nucleotides. In some embodiments, all the nucleotides of the miR-124 mimic contain 2′-O-Methoxy (2′-OMe) modification. Other exemplary combinations of different types of 2′ position modifications can contain at least one 2′-halo modification (e.g., in place of a 2′ hydroxyl), such as 2′-fluoro, 2′-chloro, 2′-bromo, and 2′-iodo.

[0351] In some embodiments, the backbone of a strand or the strand of the nucleic acid molecule can be constructed wherein the phosphate linker and ribose sugar are replaced by nuclease resistant nucleosides or nucleotide surrogates. While not wishing to be bound by theory, it is believed that the absence of a repetitively charged backbone diminishes binding to proteins that recognize polyanions (e.g., nucleases). As non-limiting examples, such nucleotide surrogates include morpholino, cyclobutyl, pyrrolidine, peptide nucleic acid (PNA), aminoethylglycyl PNA (Aegina) and backbone-extended pyrimidine PNA (bepPNA) nucleoside surrogates (e.g., U.S. Pat. Nos. 5,359,044; 5,519,134; 5,142,047 and 5,235,033; Bioorganic & Medicinal Chemistry (1996), 4:5-23). A surrogate for the replacement of the sugar-phosphate backbone involves a PNA surrogate (peptide nucleic acid). The term “peptide nucleic acid (PNA)” is chemically synthesized polymer similar to DNA and RNA, wherein the backbone is composed of repeating N-(2-aminoethyl)-glycine (AEG) units linked by peptide bonds (Nielsen et al. (1991) Science 254:1497-1500). Synthetic oligonucleotides with PNAs have higher binding strength and greater specificity in binding to complementary DNAs or RNAs, with a PNA/DNA base mismatch being more desirable than a similar DNA/RNA duplex. PNAs are not easily recognized by either nucleases or proteases, making them resistant to enzyme degradation. PNAs are also stable over a wide pH range. PNA has been suggested for use in antisense and anti-gene therapy in a number of studies. PNA is resistant to DNases and proteases and can be further modified for increased cell penetration, etc.

[0352] PNAs can be used as antisense or antigene agents for sequence-specific modulation of gene expression by, e.g., inducing transcription or translation arrest or inhibiting replication. PNAs can also be used, e.g., in the analysis of single base pair mutations in a gene by, e.g., PNA directed PCR clamping; as artificial restriction enzymes when used in combination with other enzymes, e.g., S1 nucleases (Hyrup et al. (1996) Bioorg. Med. Chem. 4:5-23; or as probes or primers for DNA sequence and hybridization (Perry-O'Keefe et al. (1996) Proc. Natl. Acad. Sci. U.S.A. 93:14670-14675).

[0353] In another embodiment, PNAs can be modified, e.g., to enhance their stability or cellular uptake, by attaching lipophilic or other helper groups to PNA, by the formation of PNA-DNA chimeras, or by the use of liposomes or other techniques of drug delivery known in the art. For example, PNA-DNA chimeras can be generated which can combine the advantageous properties of PNA and DNA. Such chimeras allow DNA recognition enzymes, e.g., RNASE H and DNA polymerases, to interact with the DNA portion while the PNA portion would provide high binding affinity and specificity. PNA-DNA chimeras can be linked using linkers of appropriate lengths selected in terms of base stacking, number of bonds between the nucleobases, and orientation (Hyrup et al. (1996) Bioorg. Med. Chem. 4:5-23). The synthesis of PNA-DNA chimeras can be performed as described in Hyrup et al. (1996) Bioorg. Med. Chem. 4:5-23 and Finn et al. (1996) Nucleic Acids Res. 24:3357-3363. For example, a DNA chain can be synthesized on a solid support using standard phosphoramidite coupling chemistry and modified nucleoside analogs. Compounds such as 5′-(4-methoxytrityl)amino-5′-deoxy-thymidine phosphoramidite can be used as a link between the PNA and the 5′ end of DNA (Mag et al. (1989) Nucleic Acids Res. 17:5973-5988). PNA monomers are then coupled in a step-wise manner to produce a chimeric molecule with a 5′ PNA segment and a 3′ DNA segment (Finn et al. (1996) Nucleic Acids Res. 24:3357-3363). Alternatively, chimeric molecules can be synthesized with a 5′ DNA segment and a 3′ PNA segment (Peterser et al. (1975) Bioorganic Med. Chem. Lett. 5:1119-11124).

[0354] Nucleic acid molecules encompassed by the present invention can also contain additional modifications, such as mismatches, bulges, or crosslinks. Similarly, they can also include other conjugates, such as linkers, heterofunctional cross linkers, dendrimer, nano-particle, peptides, organic compounds (e.g., fluorescent dyes), and/or photocleavable compounds. In some embodiments, nucleic acid molecules encompassed by the present invention can comprise any combination of two or more modifications as described herein. The nucleic acid sequences can comprise, independently, one or more modifications to one or more sugar moieties, to one or more intemucleoside linkages, and/or to one or more nucleobases. As disclosed herein, these sequences can be modified with any combinations of chemical modifications.

[0355] In some embodiments, the nucleic acid molecule is a siRNA which comprises a nucleic acid sequence wherein the sense strand and anti-sense strand comprise one or more mismatches, for example, 1, 2, 3, 4, 5, 6, 7, 8, 9, 10, or more mismatches. The term “mismatch” refers to a basepair consisting of non-complementary bases, e.g., not normal complementary G:C, A:T or A:U base pairs. In some embodiments, the antisense strand of the siRNA molecule encompassed by the present invention and the target mRNA sequence can comprise one or more mismatches, for example, 1, 2, 3, 4, 5, 6, 7, 8, 9, 10, or more mismatches. In some instances, the mismatch can be downstream of the cleavage site referencing the antisense strand. More preferably, the mismatch can be present within 1-6 nucleotides from the 3′ end of the antisense strand. In another embodiment, the siRNA molecule encompassed by the present invention comprises a bulge, e.g., one or more, e.g., 1, 2, 3, 4, 5, 6, 7, 8, 9, 10, or more, unpaired bases in the duplex siRNA. Preferably, the bulge can be in the sense strand.

[0356] In some embodiments, the siRNA molecule encompassed by the present invention comprises one or more (e.g., about 1, 2, 3, 4, 5, 6, 7, 8, 9, 10, or more) crosslinks, e.g., a crosslink wherein the sense strand is crosslinked to the antisense strand of the siRNA duplex. Crosslinkers useful in the invention are those commonly known in the art, including, but not limited to, psoralen, mitomycin C, cisplatin, chloroethylnitrosoureas and the like. Preferably, the crosslink is present downstream of the cleavage site referencing the antisense strand, and more preferably, the crosslink is present at the 5′ end of the sense strand. In accordance with the present invention, siRNA derivatives are also included, such as a siRNA derivative having a single crosslink (e.g., a psoralen crosslink), a siRNA having a photocleavable biotin (e.g., photocleavable biotin), a peptide (e.g., a Tat peptide), a nanoparticle, a peptidomimetic, organic compounds (e.g., a dye such as a fluorescent dye), or dendrimer.

[0357] In some embodiments, nucleic acid molecules encompassed by the present invention can include other appended groups, such as peptides (e.g., for targeting host cell receptors in vivo), or agents facilitating transport across the cell membrane (see, e.g., Letsinger et al. (1989) Proc. Natl. Acad. Sci. U.S.A. 86:6553-6556; Lemaitre et al. (1987) Proc. Natl. Acad. Sci. U.S.A. 84:648-652; PCT Pat. Publ. No. WO 88/09810) or the blood-brain barrier (see, e.g., PCT Publ. No. WO 89/10134). In addition, nucleic acid molecules can be modified with hybridization-triggered cleavage agents (see, e.g., Krol et al. (1988) BioTechniques 6:958-976) or intercalating agents (see, e.g., Zon (1988) Pharm. Res. 5:539-549).

[0358] k. Vectors and Other Nucleic Acid Vehicles

[0359] In accordance with the present invention, nucleic acid molecules and variants thereof can be produced by any methods known in the art, such as direct synthesis and genetic recombination techniques. Nucleic acid molecules can be present in any forms such as pure nucleic acid molecules, plasmids, DNA vectors, RNA vectors, viral vectors and particles. The term “vector” refers to a nucleic acid molecule capable of transporting another nucleic acid to which it has been linked. Vectors encompassed by the present invention can also be used to deliver the packaged polynucleotides to a cell, a local tissue site or a subject.

[0360] One type of vector is a “plasmid,” which refers to a circular double-stranded DNA loop into which additional nucleic acid segments can be ligated. Another type of vector is a “viral vector,” wherein additional DNA segments can be ligated into a viral genome. Viral nucleic acid delivery vectors can be of any kind, including Retroviruses, Adenoviruses, Adeno-associated viruses, Herpes simplex viruses and variants thereof. Viral vector technology is well-known and described in Sambrook et al. (2012, Molecular Cloning: A Laboratory Manual, Cold Spring Harbor Laboratory (4^{th} Ed.), New York).

[0361] Certain vectors are capable of autonomous replication in a host cell into which they are introduced (e.g., bacterial vectors having a bacterial origin of replication and episomal mammalian vectors). Other vectors (e.g., non-episomal mammalian vectors) are integrated into the genome of a host cell upon introduction into the host cell, and thereby are replicated along with the host genome. Moreover, certain vectors, namely expression vectors, are capable of directing the expression of genes to which they are operably linked. In general, expression vectors of utility in recombinant DNA techniques are often in the form of plasmids (vectors). However, the present invention is intended to include such other forms of expression vectors, such as viral vectors (e.g., replication defective retroviruses, adenoviruses and adeno-associated viruses), which serve equivalent functions.

[0362] Recombinant expression vectors encompassed by the present invention comprise a nucleic acid encompassed by the present invention in a form suitable for expression of the nucleic acid in a host cell. This means that the recombinant expression vectors include one or more regulatory sequences, selected on the basis of the host cells to be used for expression, which is operably linked to the nucleic acid sequence to be expressed. Within a recombinant expression vector, “operably linked” is intended to mean that the nucleotide sequence of interest is linked to the regulatory sequence(s) in a manner which allows for expression of the nucleotide sequence (e.g., in an in vitro transcription/translation system or in a host cell when the vector is introduced into the host cell). The term “regulatory sequence” is intended to include promoters, enhancers and other expression control elements (e.g., polyadenylation signals). Such regulatory sequences are described, for example, in Goeddel, Methods in Fzymology: Gene Fxpression Technology vol. 185, Academic Press, San Diego, Calif. (1991). Regulatory sequences include those which direct constitutive expression of a nucleotide sequence in many types of host cell and those which direct expression of the nucleotide sequence only in certain host cells (e.g., tissue-specific regulatory sequences). It will be appreciated by those skilled in the art that the design of the expression vector can depend on such factors as the choice of the host cell to be transformed, the level of expression of protein desired, and the like. The expression vectors encompassed by the present invention can be introduced into host cells to thereby produce proteins or peptides, including fusion proteins or peptides, encoded by nucleic acids as described herein. For example, in general, vectors contain an origin of replication functional in at least one organism, a promoter sequence and convenient restriction endonuclease site, and one or more selectable markers e.g., a drug resistance gene. Vectors can comprise native or non-native promoters operably linked to the polynucleotides encompassed by the present invention. The promoters selected can be strong, weak, constitutive, inducible, tissue specific, development stage-specific, and/or organism specific. In some embodiments, the vector can comprise regulatory sequences, such as, enhancers, transcription and translation initiation and termination codons, which are specific to the type of host cell into which the vector is to be introduced.

[0363] Recombinant expression vectors for use according to the present invention can be designed for expression of a polypeptide corresponding to a biomarker encompassed by the present invention in prokaryotic (e.g., E. coli) or eukaryotic cells (e.g., insect cells, such as using baculovirus expression vectors, yeast cells or mammalian cells). Suitable host cells are discussed further in Goeddel, supra. Alternatively, the recombinant expression vector can be transcribed and translated in vitro, for example using T7 promoter regulatory sequences and T7 polymerase.

[0364] Expression of proteins in prokaryotes is most often carried out in E col with vectors containing constitutive or inducible promoters directing the expression of either fusion or non-fusion proteins. Fusion vectors add a number of amino acids to a protein encoded therein, usually to the amino terminus of the recombinant protein. Such fusion vectors typically serve three purposes: 1) to increase expression of recombinant protein; 2) to increase the solubility of the recombinant protein; and 3) to aid in the purification of the recombinant protein by acting as a ligand in affinity purification. Often, in fusion expression vectors, a proteolytic cleavage site is introduced at the junction of the fusion moiety and the recombinant protein to enable separation of the recombinant protein from the fusion moiety subsequent to purification of the fusion protein. Such enzymes, and their cognate recognition sequences, include Factor Xa, thrombin and enterokinase. Typical fusion expression vectors include pGEX (Pharmacia Biotech Inc; Smith and Johnson (1988) Gene 67:31-40), pMAL (New England Biolabs, Beverly, Mass.) and pRIT5 (Pharmacia, Piscataway, N.J.), which fuse glutathione S-transferase (GST), maltose E binding protein, or protein A, respectively, to the target recombinant protein.

[0365] Representative, non-limiting examples of suitable inducible non-fusion E. coli expression vectors include pTrc (Amann et al. (1988) Gene 69:301-315) and pET 11d (Studier et al. (1991) Meth. Enzvmol. 185:60-89). Target biomarker nucleic acid expression from the pTrc vector relies on host RNA polymerase transcription from a hybrid trp-lac fusion promoter. Target biomarker nucleic acid expression from the pET 11d vector relies on transcription from a T7 gn10-lac fusion promoter mediated by a co-expressed viral RNA polymerase (T7 gn1). This viral polymerase is supplied by host strains BL21 (DE3) or HMS174(DE3) from a resident prophage harboring a T7 gn1 gene under the transcriptional control of the lacUV 5 promoter.

[0366] One strategy to maximize recombinant protein expression in E. coli is to express the protein in a host bacterium with an impaired capacity to proteolytically cleave the recombinant protein (Gottesman (1990) Meth. Enzymol. 185:119-128). Another strategy is to alter the nucleic acid sequence of the nucleic acid to be inserted into an expression vector so that the individual codons for each amino acid are those preferentially utilized in E. coli (Wada et al., (1992) Nucleic Acids Res. 20:2111-2118). Such alteration of nucleic acid sequences encompassed by the present invention can be carried out by standard DNA synthesis techniques.

[0367] In some embodiments, the expression vector is a yeast expression vector. Examples of vectors for expression in yeast S. cerevisiae include pYepSecl (Baldari et al. (1987) FMBO J. 6:229-234), pMFa (Kuran and Herskowitz (1982) Cell 30:933-943), pJRY88 (Schultz et al. (1987) Gene 54:113-123), pYES2 (Invitrogen Corporation, San Diego, Calif.), and pPicZ (Invitrogen Corp, San Diego, Calif.).

[0368] Alternatively, the expression vector is a baculovirus expression vector. Baculovirus vectors available for expression of proteins in cultured insect cells (e.g., Sf 9 cells) include the pAc series (Smith et al. (1983) Mol. Cell Biol. 3:2156-2165) and the pVL series (Lucklow and Summers (1989) Virology 170:31-39).

[0369] In some embodiments, a nucleic acid encompassed by the present invention is expressed in mammalian cells using a mammalian expression vector. Examples of mammalian expression vectors include pCDM8 (Seed (1987) Nature 329:840) and pMT2PC (Kaufman et al. (1987) EMBO J. 6:187-195). When used in mammalian cells, the expression vector's control functions are often provided by viral regulatory elements. For example, commonly used promoters are derived from polyoma, Adenovirus 2, cytomegalovirus and Simian Virus 40. For other suitable expression systems for both prokaryotic and eukaryotic cells see chapters 16 and 17 of Sambrook et al., supra.

[0370] In some embodiments, the recombinant mammalian expression vector is capable of directing expression of the nucleic acid preferentially in a particular cell type (e.g., tissue-specific regulatory elements are used to express the nucleic acid). Tissue-specific regulatory elements are known in the art. Non-limiting examples of suitable tissue-specific promoters include the albumin promoter (liver-specific; Pinkert et al. (1987) Genes Dev. 1:268-277), lymphoid-specific promoters (Calame and Eaton (1988) Adv. Immunol. 43:235-275), in particular promoters of T cell receptors (Winoto and Baltimore (1989) EMBO J. 8:729-733) and immunoglobulins (Banerji et al. (1983) Cell 33:729-740; Queen and Baltimore (1983) Cell 33:741-748), neuron-specific promoters (e.g., the neurofilament promoter; Byrne and Ruddle (1989) Proc. Natl. Acad. Sci. U.S.A. 86:5473-5477), pancreas-specific promoters (Edlund el al. (1985) Science 230:912-916), and mammary gland-specific promoters (e.g., milk whey promoter; U.S. Pat. No. 4,873,316 and European Application Publication No. 264,166). Developmentally-regulated promoters are also encompassed, for example the murine hox promoters (Kessel and Gruss (1990) Science 249:374-379) and the α-fetoprotein promoter (Camper and Tilghman (1989) Genes Dev. 3:537-546).

[0371] The present invention also provides recombinant expression vectors for expressing antisense nuceleic acids, as described further below. For example, DNA molecule can be operably linked to a regulatory sequence in a manner which allows for expression (by transcription of the DNA molecule) of an RNA molecule which is antisense to the mRNA encoding a polypeptide encompassed by the present invention. Regulatory sequences operably linked to a nucleic acid cloned in the antisense orientation can be chosen which direct the continuous expression of the antisense RNA molecule in a variety of cell types, for instance viral promoters and/or enhancers, or regulatory sequences can be chosen which direct constitutive, tissue-specific or cell type specific expression of antisense RNA. The antisense expression vector can be in the form of a recombinant plasmid, phagemid, or attenuated virus in which antisense nucleic acids are produced under the control of a high efficiency regulatory region, the activity of which can be determined by the cell type into which the vector is introduced. For a discussion of the regulation of gene expression using antisense genes (see Weintraub et al. (1986) Trends Genet. 1(1)).

[0372] In some embodiments, a retroviral vector is useful according to the present invention. Retroviruses are named because reverse transcription of viral RNA genomes to DNA is required before integration into the host cell genome. As such, the most important features of retroviral vectors are the permanent integration of their genetic material into the genome of a target/host cell. The most commonly used retroviral vectors for nucleic acid delivery are lentiviral vehicles/particles. Some examples of lentiviruses include the Human Immunodeficiency Viruses: HIV-1 and HIV-2, the Simian Immunodeficiency Virus (SIV), feline immunodeficiency virus (FIV), bovine immunodeficiency virus (BIV), Jembrana Disease Virus (JDV), equine infectious anemia virus (EIAV), equine infectious anemia virus, visna-maedi and caprine arthritis encephalitis virus (CAEV).

[0373] Typically, lentiviral particles making up the gene delivery vehicle are replication defective on their own, such that they are unable to replicate in the host cell and can infect only one cell (also referred to as “self-inactivating”). Lentiviruses are able to infect both dividing and non-dividing cells by virtue of the entry mechanism through the intact host nuclear envelope (Naldini et al. (1998) Curr. Opin. Biotechnol. 9:457-463). Recombinant lentiviral vehicles/particles have been generated by multiply attenuating the HIV virulence genes, for example, the genes Env, Vif, Vpr, Vpu, Nef and Tat are deleted making the vector biologically safe. Correspondingly, lentiviral vehicles, for example, derived from HIV-1/HIV-2 can mediate the efficient delivery, integration and long-term expression of transgenes into non-dividing cells. The term “recombinant” refers to a vector or other nucleic acid containing both lentiviral sequences and non-lentiviral retroviral sequences. Lentiviral particles can be generated by co-expressing the virus packaging elements and the vector genome itself in a producer cell such as HEK293T cells, 293G cells, STAR cells, and other viral expression cell lines. These elements are usually provided in three (in second generation lentiviral systems) or four separate plasmids (in third generation lentiviral systems). The producer cells are co-transfected with plasmids that encode lentiviral components including the core (i.e., structural proteins) and enzymatic components of the virus, and the envelope protein(s) (referred to as the packaging systems), and a plasmid that encodes the genome including a foreign transgene, to be transferred to the target cell, the vehicle itself (also referred to as the transfer vector).

[0374] The envelope proteins of recombinant lentiviral vectors can be heterologous envelope proteins from other viruses, such as the G protein of vesicular stomatitis virus (VSV G) or baculoviral gp64 envelop proteins. The VSV-G glycoprotein can especially be chosen among species classified in the vesiculovirus genus: Carajas virus (CJSV), Chandipura virus (CHPV), Cocal virus (COCV), Isfahan virus (ISFV), Maraba virus (MARAV), Piry virus (PIRYV), Vesicular stomatitis Alagoas virus (VSAV), Vesicular stomatitis Indiana virus (VSIV) and Vesicular stomatitis New Jersey virus (VSNJV) and/or stains provisionally classified in the vesiculovirus genus as Grass carp rhabdovirus, BeAn 157575 virus (BeAn 157575), Boteke virus (BTKV), Calchaqui virus (CQIV), Eel virus American (EVA), Gray Lodge virus (GLOV), Jurona virus (JURY), Klamath virus (KLAV), Kwatta virus (KWAV), La Joya virus (LJV), Malpais Spring virus (MSPV), Mount Elgon bat virus (MEBV), Perinet virus (PERV), Pikefry rhabdovirus (PFRV), Porton virus (PORV), Radi virus (RADIV), Spring viremia of carp virus (SVCV), Tupaia virus (TUPV), Ulcerative disease rhabdovirus (UDRV) and Yug Bogdanovac virus (YBV). The gp64 or other baculoviral env protein can be derived from Autographa californica nucleopolyhedrovirus (AcMNPV), Anagrapha falcifera nuclear polyhedrosis virus, Bombyr mori nuclear polyhedrosis virus, Choristoneura fumiferana nucleopolyhedrovirus, Orgyia pseudotsugata single capsid nuclear polyhedrosis virus, Epiphyas postvittana nucleopolyhedrovirus, Hyphantria cunea nucleopolyhedrovirus, Galleria mellonella nuclear polyhedrosis virus, Dhori virus, Thogoto virus, Antheraea pemyi nucleopolyhedrovirus or Batken virus.

[0375] Methods for generating recombinant lentiviral particles are discussed in the art, for example, U.S. Pat. Nos. 8,846,385; 7,745,179; 7,629,153; 7,575,924; 7,179,903; and 6,808,905.

[0376] Lentivirus vectors used can be selected from, but are not limited to pLVX, pLenti, pLenti6, pLJMI, FUGW, pWPXL, pWPI, pLenti CMV puro DEST, pLJM1-EGFP, pULTRA, pInducer20, pHIV-EGFP, pCW57.1, pTRPE, pELPS, pRRL, and pLionII. Lentiviral vehicles known in the art can also be used (See, U.S. Pat. Nos. 9,260,725; 9,068,199; 9,023,646; 8,900,858; 8,748,169; 8,709,799; 8,420,104; 8,329,462; 8,076,106; 6,013,516; and 5,994,136; PCT Publ. No. WO 2012079000).

[0377] Additional elements can be included in recombinant lentiviral particles including, retroviral LTR (long-terminal repeat) at either 5′ or 3′ terminus, a retroviral export element, optionally a lentiviral reverse response element (RRE), a promoter or active portion thereof, and a locus control region (LCR) or active portion thereof. Other elements include central polypurine tract (cPPT) sequence to improve transduction efficiency in non-dividing cells, Woodchuck Hepatitis Virus (WHP) Posttranscriptional Regulatory Element (WPRE) which enhances the expression of the transgene, and increases titer. The effector module is linked to the vector. In addition to lentiviral vectors based on complex HIV-1/2, retroviral vectors based on simple gamma-retroviruses have been widely used to deliver therapeutic nucleic acids and demonstrated clinically as one of the most efficient and powerful nucleic acid delivery systems capable of transducing a broad range of cell types. Example species of gamma retroviruses include the murine leukemia viruses (MLVs) and the feline leukemia viruses (FeLV). Gamma-retroviral vectors derived from a mammalian gamma-retrovirus such as murine leukemia viruses (MLVs) can be recombinant. The MLV families of gamma retroviruses include the ecotropic, amphotropic, xenotropic and polytropic subfamilies. Ecotropic viruses are able to infect only murine cells using mCAT-1 receptor. Examples of ecotropic viruses are Moloney MLV and AKV. Amphotropic viruses infect murine, human and other species through the Pit-2 receptor. One example of an amphotropic virus is the 4070A virus. Xenotropic and polytropic viruses utilize the same (Xpr1) receptor, but differ in their species tropism. Xenotropic viruses such as NZB-9-1 infect human and other species but not murine species, whereas polytropic viruses such as focus-forming viruses (MCF) infect murine, human and other species.

[0378] Gamma-retroviral vectors can be produced in packaging cells by co-transfecting the cells with several plasmids including one encoding the retroviral structural and enzymatic (gag-pol) polyprotein, one encoding the envelope (env) protein, and one encoding the vector mRNA comprising polynucleotide encoding the compositions encompassed by the present invention that is to be packaged in newly formed viral particles. The recombinant gamma-retroviral vectors can be pseudotyped with envelope proteins from other viruses. Envelope glycoproteins are incorporated in the outer lipid layer of the viral particles which can increase/alter the cell tropism. Exemplary envelop proteins include the gibbon ape leukemia virus envelope protein (GALV) or vesicular stomatitis virus G protein (VSV-G), or Simian endogenous retrovirus envelop protein, or Measles Virus H and F proteins, or Human immunodeficiency virus gp120 envelope protein, or cocal vesiculovirus envelop protein (see, e.g., U.S. Publ. No. 2012/164118). In other embodiments, envelope glycoproteins can be genetically modified to incorporate targeting/binding ligands into gamma-retroviral vectors, binding ligands including, but not limited to, peptide ligands, single chain antibodies and growth factors (Waehler et al. (2007) Nat. Rev. Genet. 8:573-587). These engineered glycoproteins can retarget vectors to cells expressing their corresponding target moieties. In other aspects, a “molecular bridge” can be introduced to direct vectors to specific cells. The molecular bridge has dual specificities: one end can recognize viral glycoproteins, and the other end can bind to the molecular determinant on the target cell. Such molecular bridges, such as ligand-receptor, avidin-biotin, chemical conjugations, monoclonal antibodies, and engineered fusogenic proteins, can direct the attachment of viral vectors to target cells for transduction (Yang et al. (2008) Biotechnol. Bioeng. 101:357-368; Maetzig et al. (2011) Viruses 3:677-713). The recombinant gamma-retroviral vectors can be self-inactivating (SIN) gammaretroviral vectors. The vectors are replication incompetent. SIN vectors can harbor a deletion within the 3′ U3 region initially comprising enhancer/promoter activity. Furthermore, the 5′ U3 region can be replaced with strong promoters (needed in the packaging cell line) derived from cytomegalovirus or RSV, or an internal promoter of choice, and/or an enhancer element. The choice of the internal promoters can be made according to specific requirements of gene expression needed for a particular purpose encompassed by the present invention.

[0379] Similarly, recombinant adeno-associated viral (rAAV) vectors can be used to package and deliver nucleic acid molecules encompassed by the present invention. Such vectors or viral particles can be designed to utilize any of the known serotype capsids or combinations of serotype capsids. The serotype capsids can include capsids from any identified AAV serotypes and variants thereof, for example, AAV1, AAV2, AAV2G9, AAV3, AAV4, AAV4-4, AAV5, AAV6, AAV7, AAV8, AAV9, AAV10, AAV11, AAV12 and AAVrh10 (see, for example. U.S. Pat. Publ. 20030138772) or variants thereof. AAV vectors include not only single stranded vectors but self-complementary AAV vectors (scAAVs). scAAV vectors contain DNA which anneals together to form double stranded vector genome. By skipping second strand synthesis, scAAVs allow for rapid expression in the cell. The rAAV vectors can be manufactured by standard methods in the art such as by triple transfection, in sf9 insect cells or in suspension cell cultures of human cells such as HEK293 cells. Nucleic acid molecules encompassed by the present invention can be encoded in one or more viral genomes to be packaged in the AAV capsids. Such vectors or viral genomes can also include, in addition to at least one or two ITRs (inverted terminal repeats), certain regulatory elements necessary for expression from the vector or viral genome. Such regulatory elements are well-known in the art and include for example promoters, introns, spacers, stuffer sequences, and the like.

[0380] In addition, non-viral delivery systems of nucleic acid molecules are well-known in the art. The term “non-viral vectors” collectively refers to any vehicles that transfer nucleic acid molecules encompassed by the present invention into cells of interest without using viral particles. Representative examples of such non-viral delivery vectors are vectors that coat nucleic acids based on the electrical interaction between cationic sites on the vectors and anionic sites on the negatively charged nucleic acids constituting genes. Some exemplary non-viral vectors for delivery can include naked nucleic acid delivery systems, polymeric delivery systems and liposomal delivery systems. Cationic polymers and cationic lipids are used for nucleic acids delivery because they can easily complex with the anionic nucleotides. Commonly used polymers can include, but are not limited to, polyethylenimine, poly-L-lysin, chitosans, and dendrimers. Cationic lipids can include but are not limited to, monovalent cationic lipids, polyvalent cationic lipids, guanidine containing lipids, cholesterol derivative compounds, cationic polymers: Poly(ethylenimine) (PEI), poly-1-lysine) (PLL), protamine, other cationic polymers and lipid-polymer hybrid.

[0381] Vector DNA can be introduced into prokaryotic or eukaryotic cells via conventional transformation or transfection techniques. As used herein, the terms “transformation” and “transfection” are intended to refer to a variety of art-recognized techniques for introducing foreign nucleic acid into a host cell, including calcium phosphate or calcium chloride co-precipitation, DEAE-dextran-mediated transfection, lipofection, or electroporation. Suitable methods for transforming or transfecting host cells can be found in Sambrook, et al. (supra), and other laboratory manuals.

[0382] For stable transfection of mammalian cells, it is known that, depending upon the expression vector and transfection technique used, only a small fraction of cells can integrate the foreign DNA into their genome. In order to identify and select these integrants, a gene that encodes a selectable marker (e.g., for resistance to antibiotics like neo, DHFR, Gln synthetase, ADA, and the like) is generally introduced into the host cells along with the gene of interest. Preferred selectable markers include those which confer resistance to drugs, such as G418, hygromycin and methotrexate. Cells stably transfected with the introduced nucleic acid can be identified by drug selection (e.g., cells that have incorporated the selectable marker gene will survive, while the other cells die).

[0383] Accordingly, the present invention encompasses host cells into which a recombinant expression vector encompassed by the present invention has been introduced. The terms “host cell” and “recombinant host cell” are used interchangeably herein. It is understood that such terms refer not only to the particular subject cell but to the progeny or potential progeny of such a cell. Because certain modifications can occur in succeeding generations due to either mutation or environmental influences, such progeny can not, in fact, be identical to the parent cell, but are still included within the scope of the term as used herein. A host cell can be any prokaryotic (e.g., E. coli) or eukaryotic cell (e.g., insect cells, yeast or mammalian cells).

[0384] 2. Protein Agents

[0385] Another aspect encompassed by the present invention involves the use of amino acid-based agents. The agents can include, but are not limited to, antibodies, fusion proteins, synthetic polypeptides, and peptides, as well as fragments thereof (e.g., biologically active fragments). Polynucleotides that encode such amino acid-based compounds are also provided.

[0386] Amino acid-based agents (e.g., antibodies and recombinant proteins) of the present invention can exist as a whole polypeptide, a plurality of polypeptides or fragments of polypeptides, which independently can be encoded by one or more nucleic acids, a plurality of nucleic acids, fragments of nucleic acids or variants of any of the aforementioned.

[0387] The term “polypeptide” refers to a polymer of amino acid residues (natural or unnatural) linked together most often by peptide bonds. The term, as used herein, refers to proteins, polypeptides, and peptides of any size, structure, or function. Thus, the term polypeptide is mutually inclusive of the terms “peptide” and “protein.” The term “fusion protein” refers to a fusion polypeptide molecule comprising at least two amino acid sequences from different resources, wherein the component amino acid sequences are linked to each other by peptide-bonds, either directly or through one or more peptide linkers. In some instances the polypeptide encoded is smaller than about 50 amino acids and the polypeptide is then termed a “peptide.” If the polypeptide is a peptide, it will be at least about 2, 3, 4, or at least 5 amino acid residues long. Thus, polypeptides include gene products, naturally occurring polypeptides, synthetic polypeptides, homologs, orthologs, paralogs, fragments and other equivalents, variants, and analogs of the foregoing. A polypeptide can be a single molecule or can be a multi-molecular complex such as a dimer, trimer or tetramer. They can also comprise single chain or multichain polypeptides and can be associated or linked. The term polypeptide can also apply to amino acid polymers in which one or more amino acid residues are an artificial chemical analogue of a corresponding naturally occurring amino acid.

[0388] An “isolated” or “purified” protein or biologically active portion thereof is substantially free of cellular material or other contaminating proteins from the cell or tissue source from which the protein is derived, or substantially free of chemical precursors or other chemicals when chemically synthesized. The language “substantially free of cellular material” includes preparations of protein in which the protein is separated from cellular components of the cells from which it is isolated or recombinantly produced. Thus, protein that is substantially free of cellular material includes preparations of protein having less than about 30%, 20%, 10%, or 5% (by dry weight) of heterologous protein (also referred to herein as a “contaminating protein”). When the protein or biologically active portion thereof is recombinantly produced, it is also preferably substantially free of culture medium, i.e., culture medium represents less than about 20%, 10%, or 5% of the volume of the protein preparation. When the protein is produced by chemical synthesis, it is preferably substantially free of chemical precursors or other chemicals, i.e., it is separated from chemical precursors or other chemicals which are involved in the synthesis of the protein. Accordingly such preparations of the protein have less than about 30%, 20%, 10%, 5% (by dry weight) of chemical precursors or compounds other than the polypeptide of interest.

[0389] In some embodiments, the native polypeptide corresponding to a marker can be isolated from cells or tissue sources by an appropriate purification scheme using standard protein purification techniques. In another embodiment, polypeptides corresponding to a marker encompassed by the present invention are produced by recombinant DNA techniques. Alternative to recombinant expression, a polypeptide corresponding to a marker encompassed by the present invention can be synthesized chemically using standard peptide synthesis techniques.

[0390] Polypeptide fragments include polypeptides comprising amino acid sequences sufficiently identical to or derived from an amino acid sequence of interest, but which includes fewer amino acids than the full length protein. They can also exhibit at least one activity of the corresponding full-length protein. Typically, biologically active portions comprise a domain or motif with at least one activity of the corresponding protein. A biologically active portion of a protein encompassed by the present invention can be a polypeptide which is, for example, 10, 25, 50, 100 or more amino acids in length. Moreover, other biologically active portions, in which other regions of the protein are deleted, can be prepared by recombinant techniques and evaluated for one or more of the functional activities of the native form of a polypeptide encompassed by the present invention.

[0391] Preferred polypeptides have an amino acid sequence of a polypeptide of interest, such as a polypeptide encoded by a nucleic acid molecule described herein. Other useful proteins are substantially identical (e.g., at least about 40%, preferably 50%, 60%, 70%, 75%, 80%, 83%, 85%, 88%, 90%, 91%, 92%, 93%, 94%, 95%, 96%, 97%, 98%, or 99%) to one of these sequences and retain the functional activity of the protein of the corresponding naturally-occurring protein yet differ in amino acid sequence due to natural allelic variation or mutagenesis.

[0392] The term “identity” as is applies to amino acid sequences is defined as the percentage of residues in the candidate amino acid sequence that are identical with the residues in the amino acid sequence of a second sequence after aligning the sequences and introducing gaps, if necessary, to achieve the maximum percent identity. Methods and computer programs for alignment are well-known in the art. It is understood that homology depends on a calculation of percent identity but can differ in value due to gaps and penalties introduced in the calculation.

[0393] To determine the percent identity of two amino acid sequences or of two nucleic acids, the sequences are aligned for optimal comparison purposes (e.g., gaps can be introduced in the sequence of a first amino acid or nucleic acid sequence for optimal alignment with a second amino or nucleic acid sequence). The amino acid residues or nucleotides at corresponding amino acid positions or nucleotide positions are then compared. When a position in the first sequence is occupied by the same amino acid residue or nucleotide as the corresponding position in the second sequence, then the molecules are identical at that position. The percent identity between the two sequences is a function of the number of identical positions shared by the sequences (i.e., % identity=# of identical positions/total # of positions (e.g., overlapping positions)×100). In one embodiment the two sequences are the same length.

[0394] The determination of percent identity between two sequences can be accomplished using a mathematical algorithm. A preferred, non-limiting example of a mathematical algorithm utilized for the comparison of two sequences is the algorithm of Karlin and Altschul (1990) Proc. Natl. Acad. Sci. U.S.A. 87:2264-2268, modified as in Karlin and Altschul (1993) Proc. Natl. Acad. Sci. U.S.A. 90:5873-5877. Such an algorithm is incorporated into the NBLAST and XBLAST programs of Altschul, et al. (1990) J. Mol. Biol. 215:403-410. BLAST nucleotide searches can be performed with the NBLAST program, score=100, wordlength=12 to obtain nucleotide sequences homologous to a nucleic acid molecules encompassed by the present invention. BLAST protein searches can be performed with the XBLAST program, score=50, wordlength=3 to obtain amino acid sequences homologous to a protein molecules encompassed by the present invention. To obtain gapped alignments for comparison purposes, Gapped BLAST can be utilized as described in Altschul et a. (1997) Nucl. Aci Res. 25:3389-3402. Alternatively, PSI-Blast can be used to perform an iterated search which detects distant relationships between molecules. When utilizing BLAST, Gapped BLAST, and PSI-Blast programs, the default parameters of the respective programs (e.g., XBLAST and NBLAST) can be used (see, for example, ncbi.nlm.nih.gov). Another preferred, non-limiting example of a mathematical algorithm utilized for the comparison of sequences is the algorithm of Myers and Miller (1988) Comput. Appl. Biosci. 4:11-17. Such an algorithm is incorporated into the ALIGN program (version 2.0) which is part of the GCG sequence alignment software package. When utilizing the ALIGN program for comparing amino acid sequences, a PAM120 weight residue table, a gap length penalty of 12, and a gap penalty of 4 can be used. Yet another useful algorithm for identifying regions of local sequence similarity and alignment is the FASTA algorithm as described in Pearson and Lipman (1988) Proc. Natl. Acad Sci. U.S.A. 85:2444-2448. When using the FASTA algorithm for comparing nucleotide or amino acid sequences, a PAM120 weight residue table can, for example, be used with a k-tuple value of 2. The percent identity between two sequences can be determined using techniques similar to those described above, with or without allowing gaps. In calculating percent identity, only exact matches are counted.

[0395] The term “polypeptide variant” or “amino acid sequence variant” refers to molecules which differ in their amino acid sequence from a native or reference sequence. The amino acid sequence variants can possess substitutions, deletions, and/or insertions at certain positions within the amino acid sequence, as compared to a native or reference sequence. The terms “native” or “reference” when referring to sequences are relative terms referring to an original molecule against which a comparison can be made. Native or reference sequences should not be confused with wild type sequences. Native sequences or molecules can represent the wild-type (that sequence found in nature) but do not have to be identical to the wild-type sequence. Variants can possess at least about 50%, at least about 55%, at least about 60%, at least about 65%, at least about 70%, at least about 75%, at least about 80%, at least about 85%, at least about 90%, at least about 91%, at least about 92%, at least about 93%, at least about 94%, at least about 95%, at least about 96%, at least about 97%, at least about 98%, at least about 99%, at least about 99.5% or at least about 99.9% amino acid sequence identity (homology) to a native or reference sequence.

[0396] Polypeptide variants have an altered amino acid sequence and, in some embodiments, can function as either agonists or as antagonists. Variants can be generated by mutagenesis, e.g., discrete point mutation or truncation. An agonist can retain substantially the same, or a subset, of the biological activities of the naturally occurring form of the protein. An antagonist of a protein can inhibit one or more of the activities of the naturally occurring form of the protein by, for example, competitively binding to a downstream or upstream member of a cellular signaling cascade which includes the protein of interest. Thus, specific biological effects can be elicited by treatment with a variant of limited function. Treatment of a subject with a variant having a subset of the biological activities of the naturally occurring form of the protein can have fewer side effects in a subject relative to treatment with the naturally occurring form of the protein.

[0397] Variants of a biomarker protein which function as either agonists or as antagonists can be identified by screening combinatorial libraries of mutants, e.g., truncation mutants, of the protein encompassed by the present invention for agonist or antagonist activity. In one embodiment, a variegated library of variants is generated by combinatorial mutagenesis at the nucleic acid level and is encoded by a variegated gene library. A variegated library of variants can be produced by, for example, enzymatically ligating a mixture of synthetic oligonucleotides into gene sequences such that a degenerate set of potential protein sequences is expressible as individual polypeptides, or alternatively, as a set of larger fusion proteins (e.g., for phage display). There are a variety of methods which can be used to produce libraries of potential variants of the polypeptides encompassed by the present invention from a degenerate oligonucleotide sequence. Methods for synthesizing degenerate oligonucleotides are known in the art (see, e.g. Narang (1983) Tetrahedron 39:3; Itakura et al. (1984) Annu. Rev. Biochem. 53:323; Itakura et al. (1984) Science 198:1056; and Ike et al. (1983) Nucleic Acid Res. 11:477).

[0398] In addition, libraries of fragments of the coding sequence of a polypeptide corresponding to a marker encompassed by the present invention can be used to generate a variegated population of polypeptides for screening and subsequent selection of variants. For example, a library of coding sequence fragments can be generated by treating a double stranded PCR fragment of the coding sequence of interest with a nuclease under conditions wherein nicking occurs only about once per molecule, denaturing the double stranded DNA, renaturing the DNA to form double stranded DNA which can include sense/antisense pairs from different nicked products, removing single stranded portions from reformed duplexes by treatment with S1 nuclease, and ligating the resulting fragment library into an expression vector. By this method, an expression library can be derived which encodes amino terminal and internal fragments of various sizes of the protein of interest.

[0399] Several techniques are known in the art for screening gene products of combinatorial libraries made by point mutations or truncation, and for screening cDNA libraries for gene products having a selected property. The most widely used techniques, which are amenable to high throughput analysis, for screening large gene libraries typically include cloning the gene library into replicable expression vectors, transforming appropriate cells with the resulting library of vectors, and expressing the combinatorial genes under conditions in which detection of a desired activity facilitates isolation of the vector encoding the gene whose product was detected. Recursive ensemble mutagenesis (REM), a technique which enhances the frequency of functional mutants in the libraries, can be used in combination with the screening assays to identify variants of a protein encompassed by the present invention (Arkin and Yourvan (1992) Proc. Natl. Acad. Sci. U.S.A. 89:7811-7815 and Delgrave et al. (1993) Pro. Engin. 6:327-331).

[0400] In some embodiments, “variant mimics” are provided. As used herein, the term “variant mimic” refers to a variant which contains one or more amino acids which would mimic an activated sequence. For example, glutamate can serve as a mimic for phospho-threonine and/or phospho-serine. Alternatively, variant mimics can result in deactivation or in an inactivated product containing the mimic, e.g., phenylalanine can act as an inactivating substitution for tyrosine; or alanine can act as an inactivating substitution for serine. The amino acid sequences can comprise naturally occurring amino acids and as such can be considered to be proteins, peptides, polypeptides, or fragments thereof. Alternatively, the agents encompassed by the present invention can comprise both naturally and non-naturally occurring amino acids. Non-naturally occurring amino acids can include, but are not limited to, amino acids comprising a carbonyl group, or an aminooxy group or a hydrazide group, or a semicarbazide group, or an azide group.

[0401] The term “homolog” as it applies to amino acid sequences is meant the corresponding sequence of other species having substantial identity to a second sequence of a second species.

[0402] The term “analog” is meant to include polypeptide variants which differ by one or more amino acid alterations, e.g., substitutions, additions or deletions of amino acid residues that still maintain the properties of the parent polypeptide.

[0403] The term “derivative” is used synonymously with the term “variant” and refers to a molecule that has been modified or changed in any way relative to a reference molecule or starting molecule. The present invention contemplates several types of compounds and/or compositions which are amino acid based including variants and derivatives. These include substitutional, insertional, deletional and covalent variants and derivatives. As such, included within the scope of the present invention is agents comprising substitutions, insertions, additions, deletions and/or covalent modifications. Amino acid residues located at the carboxy- and amino-terminal regions of the amino acid sequence of a peptide or protein can optionally be deleted providing for truncated sequences. Certain amino acids (e.g., C-terminal or N-terminal residues) can alternatively be deleted depending on the use of the sequence, as for example, expression of the sequence as part of a larger sequence which is soluble, or linked to a solid support.

[0404] “Substitutional variants” when referring to proteins are those that have at least one amino acid residue in a native or reference sequence removed and a different amino acid inserted in its place at the same position. The substitutions can be single, where only one amino acid in the molecule has been substituted, or they can be multiple, where two or more amino acids have been substituted in the same molecule. In one example, an amino acid in a polypeptide encompassed by the present invention is substituted with another amino acid having similar structural and/or chemical properties, e.g., conservative amino acid substitution. As used herein, the term “conservative amino acid substitution” refers to the substitution of an amino acid that is normally present in the sequence with a different amino acid of similar size, charge, polarity, solubility, hydrophobicity, hydrophilicity, and/or the amphipathic nature of the residues involved. Examples of conservative substitutions include the substitution of a non-polar (hydrophobic) residue such as alanine, proline, phenylalanine, tryptophan, isoleucine, valine, leucine and methionine for another non-polar residue. Likewise, examples of conservative substitutions include the substitution of one polar (hydrophilic) residue for another such as between arginine and lysine, between glutamine and asparagine, and between glycine and serine. Additionally, the substitution of a basic residue, such as lysine, arginine or histidine for another, or the substitution of one acidic residue such as aspartic acid or glutamic acid for another acidic residue are additional examples of conservative substitutions. “Non-conservative substitutions” entail exchanging a member of one of these classes for another class. Examples of non-conservative substitutions include the substitution of a non-polar (hydrophobic) amino acid residue such as isoleucine, valine, leucine, alanine, methionine for a polar (hydrophilic) residue such as cysteine, glutamine, glutamic acid or lysine and/or a polar residue for a non-polar residue. Amino acid substitutions can be generated using genetic or chemical methods well-known in the art. Genetic methods can include site-directed mutagenesis, PCR, gene synthesis and the like. It is contemplated that methods of altering the side chain group of an amino acid by methods other than genetic engineering, such as chemical modification, can also be useful.

[0405] The term “insertional variants” when referring to proteins are those with one or more amino acids inserted immediately adjacent to an amino acid at a particular position in a native or starting sequence. As used herein, the term “immediately adjacent” refers to an adjacent amino acid that is connected to either the alpha-carboxy or alpha-amino functional group of a starting or reference amino acid. By contrast, the term “deletional variants” when referring to proteins, are those with one or more amino acids in the native or starting amino acid sequence removed. Ordinarily, deletional variants will have one or more amino acids deleted in a particular region of the molecule.

[0406] The term “derivatives” includes variants of a native or reference protein comprising one or more modifications with organic proteinaceous or non-proteinaceous derivatizing agents, and post-translational modifications. Covalent modifications are traditionally introduced by reacting targeted amino acid residues of the protein with an organic derivatizing agent that is capable of reacting with selected side-chains or terminal residues, or by harnessing mechanisms of post-translational modifications that function in selected recombinant host cells. The resultant covalent derivatives are useful in programs directed at identifying residues important for biological activity, for immunoassays, or for the preparation of anti-protein antibodies for immunoaffinity purification of the recombinant glycoprotein. Such modifications are within the ordinary skill in the art and are performed without undue experimentation.

[0407] Certain post-translational modifications are the result of the action of recombinant host cells on the expressed polypeptide. Glutaminyl and asparaginyl residues are frequently post-translationally deamidated to the corresponding glutamyl and aspartyl residues. Alternatively, these residues are deamidated under mildly acidic conditions. Either form of these residues can be present in the proteins used in accordance with the present invention. Other post-translational modifications include hydroxylation of proline and lysine, phosphorylation of hydroxyl groups of seryl or threonyl residues, methylation of the alpha-amino groups of lysine, arginine, and histidine side chains (T. E. Creighton, Proteins: Structure and Molecular Properties, W.H. Freeman & Co., San Francisco, pp. 79-86 (1983)).

[0408] In some embodiments, covalently modified polypetides (e.g., fusion proteins) are provided, such as polypeptides modified with a heterologous polypeptide and/or a non-polypeptide modification. For example, covalent derivatives specifically include fusion molecules in which proteins encompassed by the present invention are covalently bonded to a non-proteinaceous polymer. The non-proteinaceous polymer ordinarily is a hydrophilic synthetic polymer (i.e., a polymer not otherwise found in nature). However, polymers which exist in nature and are produced by recombinant or in vitro methods are useful, as are polymers which are isolated from nature. Hydrophilic polyvinyl polymers fall within the scope of this invention, e.g., polyvinylalcohol and polyvinylpyrrolidone. Particularly useful are polyvinylalkylene ethers such a polyethylene glycol, polypropylene glycol (PEG). The proteins can be linked to various non-proteinaceous polymers, such as polyethylene glycol, polypropylene glycol or polyoxyalkylenes, in the manner set forth in U.S. Pat. Nos. 4,640,835; 4,496,689; 4,301,144; 4,670,417; 4,791,192 or 4,179,337. Fusion molecules can further comprise proteins encompassed by the present invention which are covalently bonded to other biologically active molecules, or linkers.

[0409] The terms “chimeric protein” or “fusion protein” refer to polypeptides comprising all or part (preferably a biologically active part) of a polypeptide corresponding to a polypeptide encompassed by the present invention operably linked to a heterologous polypeptide (e.g., a polypeptide other than the biomarker polypeptide). Within the fusion protein, the term “operably linked” is intended to indicate that the polypeptide encompassed by the present invention and the heterologous polypeptide are fused in-frame to each other. The heterologous polypeptide can be fused to the amino-terminus or the carboxyl-terminus of the polypeptide encompassed by the present invention.

[0410] One useful fusion protein is a GST fusion protein in which a polypeptide corresponding to a marker encompassed by the present invention is fused to the carboxyl terminus of GST sequences. Such fusion proteins can facilitate the purification of a recombinant polypeptide encompassed by the present invention. In another embodiment, the fusion protein contains a heterologous signal sequence, immunoglobulin fusion protein, toxin, or other useful protein sequence. Chimeric and fusion proteins encompassed by the present invention can be produced by standard recombinant DNA techniques. In another embodiment, the fusion gene can be synthesized by conventional techniques including automated DNA synthesizers. Alternatively, PCR amplification of gene fragments can be carried out using anchor primers which give rise to complementary overhangs between two consecutive gene fragments which can subsequently be annealed and re-amplified to generate a chimeric gene sequence (see, e.g., Ausubel et al., supra). Moreover, many expression vectors are commercially available that already encode a fusion moiety (e.g., a GST polypeptide). A nucleic acid encoding a polypeptide encompassed by the present invention can be cloned into such an expression vector such that the fusion moiety is linked in-frame to the polypeptide encompassed by the present invention.

[0411] A signal sequence can be used to facilitate secretion and isolation of the secreted protein or other proteins of interest. Signal sequences are typically characterized by a core of hydrophobic amino acids which are generally cleaved from the mature protein during secretion in one or more cleavage events. Such signal peptides contain processing sites that allow cleavage of the signal sequence from the mature proteins as they pass through the secretory pathway. Thus, the present invention encompasses the described polypeptides having a signal sequence, as well as to polypeptides from which the signal sequence has been proteolytically cleaved (i.e., the cleavage products). In one embodiment, a nucleic acid sequence encoding a signal sequence can be operably linked in an expression vector to a protein of interest, such as a protein which is ordinarily not secreted or is otherwise difficult to isolate. The signal sequence directs secretion of the protein, such as from a eukaryotic host into which the expression vector is transformed, and the signal sequence is subsequently or concurrently cleaved. The protein can then be readily purified from the extracellular medium by art recognized methods. Alternatively, the signal sequence can be linked to the protein of interest using a sequence which facilitates purification, such as with a GST domain.

[0412] The term “features” when referring to proteins are defined as distinct amino acid sequence-based components of a molecule. Features of the proteins encompassed by the present invention include surface manifestations, local conformational shape, folds, loops, half-loops, domains, half-domains, sites, termini or any combination thereof. For example, the term “surface manifestation” when referring to proteins refers to a polypeptide based component of a protein appearing on an outermost surface. The term “local conformational shape” when referring to proteins refers to a polypeptide based structural manifestation of a protein which is located within a definable space of the protein. The term “fold” when referring to proteins refers to the resultant conformation of an amino acid sequence upon energy minimization. A fold can occur at the secondary or tertiary level of the folding process. Examples of secondary level folds include beta sheets and alpha helices. Examples of tertiary folds include domains and regions formed due to aggregation or separation of energetic forces. Regions formed in this way include hydrophobic and hydrophilic pockets, and the like. The term “turn” as it relates to protein conformation refers to a bend which alters the direction of the backbone of a peptide or polypeptide and can involve one, two, three or more amino acid residues. The term “loop” as it relates to proteins refers to a structural feature of a peptide or polypeptide which reverses the direction of the backbone of a peptide or polypeptide and comprises four or more amino acid residues (Oliva et al. (1997) J. Mol. Biol. 266:814-830). The term “half-loop” when referring to proteins refers to a portion of an identified loop having at least half the number of amino acid resides as the loop from which it is derived. It is understood that loops do not always contain an even number of amino acid residues. Therefore, in those cases where a loop contains or is identified to comprise an odd number of amino acids, a half-loop of the odd-numbered loop will comprise the whole number portion or next whole number portion of the loop (number of amino acids of the loop/2+/−0.5 amino acids). For example, a loop identified as a 7 amino acid loop could produce half-loops of 3 amino acids or 4 amino acids (7/2=3.5+/−0.5 being 3 or 4). The term “domain” when referring to proteins refers to a motif of a polypeptide having one or more identifiable structural or functional characteristics or properties (e.g., binding capacity and/or serving as a site for protein-protein interactions). The term “half-domain” when referring to proteins refers to a portion of an identified domain having at least half the number of amino acid resides as the domain from which it is derived. It is understood that domains do not always contain an even number of amino acid residues. Therefore, in those cases where a domain contains or is identified to comprise an odd number of amino acids, a half-domain of the odd-numbered domain will comprise the whole number portion or next whole number portion of the domain (number of amino acids of the domain/2+/−0.5 amino acids). For example, a domain identified as a 7 amino acid domain could produce half-domains of 3 amino acids or 4 amino acids (7/2=3.5+/−0.5 being 3 or 4). It is also understood that sub-domains can be identified within domains or half-domains, these subdomains possessing less than all of the structural or functional properties identified in the domains or half domains from which they were derived. It is also understood that the amino acids that comprise any of the domain types herein need not be contiguous along the backbone of the polypeptide (i.e., nonadjacent amino acids can fold structurally to produce a domain, half-domain or subdomain). The term “site” as it pertains to amino acid-based embodiments is used synonymously with “amino acid residue” and “amino acid side chain.” A site represents a position within a peptide or polypeptide that can be modified, manipulated, altered, derivatized or varied within the amino acid based molecules encompassed by the present invention. The terms “termini” or “terminus” when referring to proteins refer to an extremity of a peptide or polypeptide. Such extremities are not limited only to the first or final site of the peptide or polypeptide but can include additional amino acids in the terminal regions. The polypeptide based molecules encompassed by the present invention can be characterized as having both an N-terminus (i.e., terminated by an amino acid with a free amino group (NH2)) and a C-terminus (i.e., terminated by an amino acid with a free carboxyl group (COOH)). Proteins encompassed by the present invention are in some cases made up of multiple polypeptide chains brought together by disulfide bonds or by non-covalent forces, such as multimers or oligomers. These proteins have multiple N- and C-termini. Alternatively, the termini of the polypeptides can be modified such that they begin or end, as the case can be, with a non-polypeptide based moiety such as an organic conjugate.

[0413] Once any of the features have been identified or defined as a component of a molecule encompassed by the present invention, any of several manipulations and/or modifications of these features can be performed by moving, swapping, inverting, deleting, randomizing or duplicating. Furthermore, it is understood that manipulation of features can result in the same outcome as a modification to the molecules encompassed by the present invention. For example, a manipulation which involved deleting a domain would result in the alteration of the length of a molecule just as modification of a nucleic acid to encode less than a full length molecule would. Modifications and manipulations can be accomplished by methods known in the art such as site directed mutagenesis.

[0414] In some embodiments, agents described herein can comprise one or more atoms that are isotopes. As used herein, the term “isotope” refers to a chemical element that has one or more additional neutrons, such as deuterium isotopes.

[0415] 3. Antibody Agents

[0416] In another aspect, antibody agents, and variant and/or antigen-binding fragments thereof, are encompassed by the present invention.

[0417] a. Antibody Compositions

[0418] The term “antibody” or “Ab” is used in the broadest sense and specifically includes, without limitation, whole antibodies, monoclonal antibodies, polyclonal antibodies, multispecific antibodies (e.g., bispecific antibodies formed from at least two intact antibodies, trispecific, or antibodies of greater multispecificity), antibody fragments, diabodies, antibody variants, and antibody-derived binding domains that are part of or associated with other peptides. Antibodies are primarily amino-acid based molecules but can also comprise one or more modifications (including, but not limited to the addition of sugar moieties, fluorescent moieties, chemical tags, etc.). In some cases, antibodies can include non-amino acid-based molecules. Antibodies encompassed by the present invention can be naturally occurring or produced by bioengineering.

[0419] In some embodiment, an antibody can comprise a heavy and light variable domain as well as an Fc region. The term “native antibody” refers to a usually heterotetrameric glycoprotein of about 150,000 daltons that is composed of two identical light (L) chains and two identical heavy (H) chains. Each light chain is linked to a heavy chain by one covalent disulfide bond, while the number of disulfide linkages varies among the heavy chains of different immunoglobulin isotypes (e.g., IgG, IgA, IgE and IgM). Each heavy and light chain also has regularly spaced intrachain disulfide bridges. Each heavy chain has at one end a variable domain (VH) followed by a number of constant domains. Each light chain has a variable domain at one end (VL) and a constant domain at its other end; the constant domain of the light chain is aligned with the first constant domain of the heavy chain, and the light chain variable domain is aligned with the variable domain of the heavy chain. The rest of the constant domains of a heavy chain of an antibody's two heavy chains compose of the fragment crystallizable (Fc) region of the antibody. The Fc region in the tail region of an antibody interacts with cell surface receptors called Fc receptors and some proteins of the complement system.

[0420] The term “light chain” refers to a component of an antibody from any vertebrate species assigned to one of two clearly distinct types, called kappa and lambda, based on amino acid sequences of constant domains. Depending on the amino acid sequence of the constant domain of their heavy chains, antibodies can be assigned to different classes. There are five major classes of intact antibodies: IgA, IgD, IgE, IgG, and IgM, and several of these can be further divided into subclasses (isotypes), e.g., IgG1, IgG2, IgG3, IgG4, IgA, and IgA2.

[0421] The term “variable domain” refers to specific antibody domains on both the antibody heavy and light chains that differ extensively in sequence among antibodies and are used in the binding and specificity of each particular antibody for its particular antigen. For example, the term “VH” refers to “heavy chain variable domain” and the term “VL” refers to “light chain variable chain.” Variable domains comprise hypervariable regions. The term “hypervariable region” refers to a region within a variable domain comprising amino acid residues responsible for antigen binding. These regions are hypervariable in sequence and/or form structurally defined loops. The amino acids present within the hypervariable regions determine the structure of the complementarity determining regions (CDRs) that become part of the antigen-binding site of the antibody. Generally, antibodies comprise six HVRs; three in the VH (H1, H2, H3), and three in the VL (L1, L2, L3). In native antibodies, H3 and L3 display the most diversity of the six HVRs, and H3 in particular is believed to play a unique role in conferring fine specificity to antibodies (see, e.g., Xu et al. (2000) Immunity 13, 37-45; Johnson and Wu (2003) Meth. Mol. Biol. 248:1-25). The term “CDR” refers to a region of an antibody comprising a structure that is complimentary to its target antigen or epitope. Other portions of the variable domain that do not interact with the antigen are referred to as framework (FW) regions. The antigen-binding site (also known as the antigen combining site or paratope) comprises the amino acid residues necessary to interact with a particular antigen. The exact residues making up the antigen-binding site are typically elucidated by co-crystallography with bound antigen, however computational assessments based on comparisons with other antibodies can also be used (Strohl, W. R. Therapeutic Antibody Engineering. Woodhead Publishing, Philadelphia Pa. 2012. Ch. 3, p47-54). Determining residues that make up CDRs can include the use of numbering schemes including, but not limited to, those taught by Kabat (Wu et al. (1970) JEM 132:211-250; Kabat et al. (1992) in “Sequences of Proteins of Immunological Interest,” 5^{th} Edition, U.S. Department of Health and Human Services; Johnson et al. (2000) Nucl. Acids Res. 28:214-218), Chothia (Chothia and Lesk (1987) J. Mol. Biol. 196:901; Chothia et al. (1989) Nature 342:877; Al-Lazikani et al. (1997) J. Mol. Biol. 273:927-948), Lefranc (Lefranc et al. (1995) Immunome Res. 1:3), Honegger (Honegger and Pluckthun (2001) J. Mol. Biol. 309: 657-670), and MacCallum (MacCallum et al. (1996) J. Mol. Biol. 262:732).

[0422] VH and VL domains each have three CDRs. VL CDRs are referred to herein as CDR-L1, CDR-L2 and CDR-L3, in order of occurrence when moving from N- to C-terminus along the variable domain polypeptide. VH CDRs are referred to herein as CDR-H1, CDR-H2 and CDR-H3, in order of occurrence when moving from N- to C-terminus along the variable domain polypeptide. Each of CDRs has favored canonical structures, with the exception of the CDR-H3, which comprises amino acid sequences that can be highly variable in sequence and length between antibodies resulting in a variety of three-dimensional structures in antigen-binding domains (Nikoloudis et al. (2014) Peer J. 2:e456). In some cases, CDR-H3s can be analyzed among a panel of related antibodies to assess antibody diversity. Various methods of determining CDR sequences are known in the art and can be applied to known antibody sequences (Strohl, W. R. Therapeutic Antibody Engineering. Woodhead Publishing, Philadelphia Pa. 2012. Ch. 3, p 47-54).

[0423] In some embodiments, antibody fragments and variants can comprise any portion of an intact antibody. The terms “antibody fragments” and “antibody variants” also include any synthetic or genetically engineered proteins/polypeptides that act like an antibody by binding to a specific antigen to form a complex. In some embodiments, antibody fragments and variants comprise antigen binding regions from intact antibodies. Examples of antibody fragments can include, but are not limited to Fab, Fab′, F(ab′)₂, and Fv fragments; Fd, diabodies; intrabodies, linear antibodies; single-chain antibody molecules such as single chain variable fragment (scFv); multi-specific antibodies formed from antibody fragments, and the like. Regardless of structure, an antibody fragment or variant binds with the same antigen that is recognized by the parent full-length antibody.

[0424] Antibody fragments produced by limited proteolysis of wild-type antibodies are called proteolytic antibody fragments. These include, but are not limited to, Fab fragments, Fab′ fragments and F(ab′)₂ fragments. Papain digestion of antibodies produces two identical antigen-binding fragments, called “Fab” fragments, each with a single antigen-binding site. Also produced is a residual “Fc” fragment, whose name reflects its ability to crystallize readily. Pepsin or ficin treatment yields a F(ab′)₂ fragment that has two antigen-binding sites and is still capable of cross-linking antigen. In general, an F(ab′)₂ fragment comprises two “arms,” each of which comprises a variable region that is directed to and specifically binds a common antigen. The two Fab′ molecules are joined by interchain disulfide bonds in the hinge regions of the heavy chains; the Fab′ molecules can be directed toward the same (bivalent) or different (bispecific) epitopes. As used herein, the “Fab′ fragments” contain a single anti-binding domain including an Fab and an additional portion of the heavy chain through the hinge region. Compounds and/or compositions encompassed by the present invention can comprise one or more of these fragments.

[0425] The term “Fv” refers to antibody fragments comprising complete antigen-recognition and antigen-binding sites. These regions consist of a dimer of one heavy chain and one light chain variable domain in tight, non-covalent association. Fv fragments can be generated by proteolytic cleavage, but are largely unstable. Recombinant methods are known in the art for generating stable Fv fragments, typically through insertion of a flexible linker between the light chain variable domain and the heavy chain variable domain (to form a single chain Fv (scFv) or through the introduction of a disulfide bridge between heavy and light chain variable domains (Strohl, W. R. Therapeutic Antibody Engineering. Woodhead Publishing, Philadelphia Pa. 2012. Ch. 3, p 46-47).

[0426] The term “single-chain Fv” or “scFv” refers to a fusion protein of VH and VL antibody domains, wherein these domains are linked together into a single polypeptide chain by a flexible peptide linker. In some embodiments, the Fv polypeptide linker enables the scFv to form the desired structure for antigen binding. In some embodiments, the VH and VL domains can be linked by a peptide of 10 to 30 amino acid residues. In some embodiments, scFvs are utilized in conjunction with phage display, yeast display or other display methods where they can be expressed in association with a surface member (e.g., phage coat protein) and used in the identification of high affinity peptides for a given antigen. In some embodiments, the term “single-chain antibody” can further include, but is not limited to, a disulfide-linked Fv (dsFv) in which two single-chain antibodies (each of which can be directed to a different epitope) linked together by a disulfide bond. Using molecular genetics, two scFvs can be engineered in tandem into a single polypeptide, separated by a linker domain, called a “tandem scFv” (tascFv). Construction of a tascFv with genes for two different scFvs yields a “bispecific single-chain variable fragments” (bis-scFvs) (Nelson (2010) Mabs 2:77-83). Maxibodies (bivalent scFv fused to the amino terminus of the Fc (CH₂—CH₃ domains) of IgG can also be included.

[0427] In some embodiments, the antibody can comprise a modified Fc region. As a non-limiting example, the modified Fc region can be made by the methods or can be any of the regions described in U.S. Pat. Publ. No. US 2015-0065690.

[0428] The term “polyclonal antibodies” includes antibodies generated in an immunogenic response to a protein having many epitopes. A composition (e.g., serum) of polyclonal antibodies thus includes a variety of different antibodies directed to the same and to different epitopes within the protein. Methods for producing polyclonal antibodies are known in the art (see, e.g., Cooper et al., Section III of Chapter 11 in: Short Protocols in Molecular Biology, 2nd Ed., Ausubel et al., eds., John Wiley and Sons, New York, 1992, pages 11-37 to 11-41).

[0429] By contrast, the term “monoclonal antibody” refers to an antibody obtained from a population of substantially homogeneous cells (or clones), i.e., the individual antibodies comprising the population are identical and/or bind the same specific epitope of an antigen, except for possible variants that can arise during production of the monoclonal antibodies, such variants generally being present in minor amounts. In contrast to polyclonal antibody preparations that typically include different antibodies directed against different determinants (epitopes), each monoclonal antibody is directed against a single determinant on the antigen. The modifier “monoclonal” indicates the character of the antibody as being obtained from a substantially homogeneous population of antibodies, and is not to be construed as requiring production of the antibody by any particular method. Monoclonal antibodies include “chimeric” antibodies (immunoglobulins) in which a portion of the heavy and/or light chain is identical with or homologous to corresponding sequences in antibodies derived from a particular species or belonging to a particular antibody class or subclass, while the remainder of the chain(s) is identical with or homologous to corresponding sequences in antibodies derived from another species or belonging to another antibody class or subclass, as well as fragments of such antibodies.

[0430] The term “antibody variant” refers to a modified antibody (in relation to a native or starting antibody) or a biomolecule resembling a native or starting antibody in structure and/or function which includes some differences in their amino acid sequence, composition or structure as compared to the native or starting antibody (e.g., an antibody mimetic). Antibody variants can be altered in their amino acid sequence, composition or structure as compared to a native antibody. Antibody variants can include, but are not limited to, antibodies with altered isotypes (e.g., IgA, IgD, IgE, IgG1, IgG2, IgG3, IgG4, or IgM), humanized variants, optimized variants, multispecific antibody variants (e.g., bispecific variants), and antibody fragments.

[0431] In some embodiments, antibodies encompassed by the present invention can comprise antibody fusion proteins. As used herein, the term “antibody fusion protein” is a recombinantly produced antigen-binding molecule in which two or more of the same or different natural antibody, single-chain antibody or antibody fragment segments with the same or different specificities are linked. Valency of the fusion protein indicates the total number of binding arms or sites the fusion protein has to an antigen or epitope; i.e., monovalent, bivalent, trivalent or multivalent. The multivalency of the antibody fusion protein means that it can take advantage of multiple interactions in binding to an antigen, thus increasing the avidity of binding to the antigen. Specificity indicates how many different antigens or epitopes an antibody fusion protein is able to bind, i.e., monospecific, bispecific, trispecific, multispecific, etc. Using these definitions, a natural antibody, e.g., an IgG, is bivalent because it has two binding arms but is monospecific because it binds to one antigen. Monospecific, multivalent fusion proteins have more than one binding site for an epitope but only bind with the same epitope on the same antigen, for example a diabody with two binding sites reactive with the same antigen. The fusion protein can include a multivalent or multispecific combination of different antibody components or multiple copies of the same antibody component. The fusion protein can additionally include a therapeutic agent. Examples of therapeutic agents suitable for such fusion proteins include immunomodulators (“antibody-immunomodulator fusion protein”) and toxins (“antibody-toxin fusion protein”). One preferred toxin comprises a ribonuclease (RNase), preferably a recombinant RNase.

[0432] In some embodiments, antibodies encompassed by the present invention can include multispecific antibodies. As used herein, the term “multispecific antibody” refers to an antibody that binds more than one epitope. As used herein, the terms “multibody” or “multispecific antibody” refer to an antibody wherein two or more variable regions bind to different epitopes. The epitopes can be on the same or different targets. In one embodiment, the multispecific antibody can be generated and optimized by the methods described in PCT Publ. No. WO 2011/109726 and U.S. Pat. Publ. No. 2015-0252119. These antibodies are able to bind to multiple antigens with high specificity and high affinity. In some embodiments, a multispecific antibody is a “bispecific antibody.” As used herein, the term “bispecific antibody” refers to an antibody capable of binding two different epitopes on the same or different antigens. In one aspect, bispecific antibodies are capable of binding two different antigens. Such antibodies typically comprise antigen-binding regions from at least two different antibodies. For example, a bispecific monoclonal antibody (BsMAb, BsAb) is an artificial protein composed of fragments of two different monoclonal antibodies, thus allowing the BsAb to bind to two different types of antigen. Bispecific antibodies can include any of those described in Riethmuller (2012) Cancer Immun. 12:12-18, Marvin et al. (2005) Acta Pharmacol. Sinica 26:649-658, and Schaefer et al. (2011) Proc. Natl. Acad. Sci. U.S.A. 108:11187-11192. New generations of BsMAb, called “trifunctional bispecific” antibodies, have been developed. These consist of two heavy and two light chains, one each from two different antibodies, where the two Fab regions (the arms) are directed against two antigens, and the Fc region (the foot) comprises the two heavy chains and forms the third binding site.

[0433] In some embodiments, compositions encompassed by the present invention can include anti-peptide antibodies. As used herein, the term “anti-peptide antibodies” refers to “monospecific antibodies” that are generated in a humoral response to a short (typically, 5 to 20 amino acids) immunogenic polypeptide that corresponds to a few (preferably one) isolated epitopes of the protein from which it is derived (e.g., a target protein encompassed by the present invention). A plurality of antipeptide antibodies includes a variety of different antibodies directed to a specific portion of the protein, i.e., to an amino acid sequence that contains at least one, preferably only one, epitope. Methods for producing antipeptide antibodies are known in the art (see, e.g., Cooper et al., Section III of Chapter 11 in: Short Protocols in Molecular Biology, 2nd Ed., Ausubel et al., eds., John Wiley and Sons, New York, 1992, pages 11-42 to 11-46).

[0434] In some embodiments, antibodies encompassed by the present invention can include diabodies. As used herein, the term “diabody” refers to a small antibody fragment with two antigen-binding sites. Diabodies comprise a heavy chain variable domain VH connected to a light chain variable domain VL in the same polypeptide chain. By using a linker that is too short to allow pairing between the two domains on the same chain, the domains are forced to pair with the complementary domains of another chain and create two antigen-binding sites. Diabodies are described more fully in, for example, EP 404,097; WO 93/11161; and Hollinger et al. (1993) Proc. Natl. Acad. Sci. U.S.A. 90:6444-6448.

[0435] In some embodiments, antibodies encompassed by the present invention can include intrabodies. As used herein, the term “intrabody” refers to a form of antibody that is not secreted from a cell in which it is produced, but instead targets one or more intracellular proteins. Intrabodies can be used to affect a multitude of cellular processes including, but not limited to intracellular trafficking, transcription, translation, metabolic processes, proliferative signaling and cell division. In some embodiments, methods encompassed by the present invention can include intrabody-based therapies. In some such embodiments, variable domain sequences and/or CDR sequences disclosed herein can be incorporated into one or more constructs for intrabody-based therapy. For example, intrabodies can target one or more glycated intracellular proteins or can modulate the interaction between one or more glycated intracellular proteins and an alternative protein. The intracellular expression of intrabodies in different compartments of mammalian cells allows blocking or modulation of the function of endogenous molecules (Biocca et al. (1990) EMBO J. 9:101-108; Colby et al. (2004) Proc. Natl. Acad. Sci. U.S.A. 101: 17616-17621). Intrabodies can alter protein folding, protein-protein, protein-DNA, protein-RNA interactions and protein modification. They can induce a phenotypic knockout and work as neutralizing agents by direct binding to the target antigen, by diverting its intracellular trafficking or by inhibiting its association with binding partners. With high specificity and affinity to target antigens, intrabodies have advantages to block certain binding interactions of a particular target molecule, while sparing others. Sequences from donor antibodies can be used to develop intrabodies. Intrabodies are often recombinantly expressed as single domain fragments such as isolated VH and VL domains or as a single chain variable fragment (scFv) antibody within the cell. For example, intrabodies are often expressed as a single polypeptide to form a single chain antibody comprising the variable domains of the heavy and light chains joined by a flexible linker polypeptide. Intrabodies typically lack disulfide bonds and are capable of modulating the expression or activity of target genes through their specific binding activity. Single chain intrabodies are often expressed from a recombinant nucleic acid molecule and engineered to be retained intracellularly (e.g., retained in the cytoplasm, endoplasmic reticulum, or periplasm). Intrabodies can be produced using methods known in the art, such as those disclosed and reviewed in, for example, Marasco et al. (1993) Proc. Natl. Acad. Sci. U.S.A. 90:7889-7893; Chen et al. (1994) Hum. Gene Ther. 5:595-601; Chen et al. (1994) Proc. Natl. Acad. Sci. U.S.A. 91:5932-5936; Maciejewski et al. (1995) Nat. Med. 1:667-673; Marasco (1995) Immunotech. 1: 1-19; Mhashilkar et al. (1995) AfBO J. 14: 542-1451; Chen et al. (1996) Hum. Gene Therap. 7:1515-1525; Marasco (1997) Gene 7her. 4:11-15; Rondon and Marasco (1997) Annu. Rev. Microbiol. 51:257-283; Cohen et al. (1998) Oncogene 17:2445-2456; Proba et al. (1998) J Mol. Biol. 275:245-253; Cohen et al. (1998) Oncogene 17:2445-2456; Hassanzadeh et al. (1998) FEBS Lett. 437:81-86; Richardson et al. (1998) Gene Ther. 5:635-644; Ohage and Steipe (1999) J. Mol. Biol. 291:1119-1128; Ohage et al. (1999) J. Mol. Biol. 291:1129-1134; Wirtz and Steipe (1999) Protein Sci. 8:2245-2250; Zhu et al. (1999) J. Immunol. Methods 231:207-222; Arafat et al. (2000) Cancer Gene Ther. 7:1250-1256; der Maur et al. (2002) J. Biol. Chem. 277:45075-45085; Mhashilkar et al. (2002) Gene Ther. 9:307-319; and Wheeler et al. (2003) FASEB J. 17:1733-1735).

[0436] In some embodiments, antibodies encompassed by the present invention can include chimeric antibodies. As used herein, the term “chimeric antibody” refers to a recombinant antibody in which a portion of the heavy and light chain is identical with or homologous to corresponding sequences in antibodies derived from a particular species or belonging to a particular antibody class or subclass, while the remainder of the chain(s) is identical with or homologous to corresponding sequences in antibodies derived from another species or belonging to another antibody class or subclass, as well as fragments of such antibodies, so long as they exhibit the desired biological activity (see, for example, U.S. Pat. No. 4,816,567; Morrison et al. (1984) Proc. Natl. Acad. Sci. U.S.A. 81:6851-6855). For example, a chimeric antibodies of interest herein can include “primatized” antibodies comprising variable domain antigen-binding sequences derived from a non-human primate (e.g., Old World Monkey, such as baboon, rhesus or cynomolgus monkey) and human constant region sequences.

[0437] In some embodiments, antibodies encompassed by the present invention can be humanized antibodies. As used herein, the term “humanized antibody” refers to a chimeric antibody comprising a minimal portion from one or more non-human (e.g., murine) antibody source with the remainder derived from one or more human immunoglobulin sources. For the most part, humanized antibodies are human immunoglobulins (recipient antibody) in which residues from the hypervariable region from an antibody of the recipient are replaced by residues from the hypervariable region from an antibody of a non-human species (donor antibody) such as mouse, rat, rabbit or nonhuman primate having the desired specificity, affinity, and/or capacity. In one embodiment, the antibody can be a humanized full-length antibody. Humanized antibodies can be generated using protein engineering techniques (e.g., Gussow and Seemann (1991) Meth. Enzymol. 203:99-121). As a non-limiting example, the antibody can have been humanized using the methods taught in U.S. Pat. Publ. No. 2013/0303399.

[0438] In some embodiments, antibodies encompassed by the present invention can include cysteine-modified antibodies. In “cysteine-modified antibodies,” a cysteine amino acid is inserted or substituted on the surface of antibody by genetic manipulation and used to conjugate the antibody to another molecule via, e.g., a disulfide bridge. Cysteine substitutions or insertions for antibodies have been described (see, e.g., U.S. Pat. No. 5,219,996). Methods for introducing cysteine residues into the constant region of the IgG antibodies for use in site-specific conjugation of antibodies are described by Stimmel et al. (2000). J. Biol. Chem. 275:330445-30450).

[0439] In some embodiments, antibody variants encompassed by the present invention can be antibody mimetics. As used herein, the term “antibody mimetic” refers to any molecule which mimics the function or effect of an antibody and which binds specifically and with high affinity to their molecular targets. In some embodiments, antibody mimetics can be monobodies, designed to incorporate the fibronectin type III domain (Fn3) as a protein scaffold (see U.S. Pat. Nos. 6,673,901 and 6,348,584). In some embodiments, antibody mimetics can include any of those known in the art including, but are not limited to affibody molecules, affilins, affitins, anticalins, avimers, Centyrins, DARPINS™, Fynomers and Kunitz and domain peptides. In other embodiments, antibody mimetics can include one or more non-peptide region.

[0440] In some embodiments, antibodies encompassed by the present invention can comprise a single antigen-binding domain. These molecules are extremely small, with molecular weights approximately one-tenth of those observed for full-sized mAbs. Further antibodies can include “nanobodies” derived from the antigen-binding variable heavy chain regions (VHHs) of heavy chain antibodies found in camels and llamas, which lack light chains (see, e.g., Nelson (2010) Mabs 2:77-83).

[0441] In some embodiments, antibodies encompassed by the present invention can be “miniaturized.” On example of mAb miniaturization is small modular immunopharmaceuticals (SMIPs). These molecules, which can be monovalent or bivalent, are recombinant single-chain molecules containing one VL, one VH antigen-binding domain, and one or two constant “effector” domains, all connected by linker domains. (see, e.g., Nelson (2010) Mabs 2:77-83). Such a molecule is believed to offer the advantages of increased tissue or tumor penetration claimed by fragments while retaining the immune effector functions conferred by constant domains. Another example of miniaturized antibodies is called a “unibody” in which the hinge region has been removed from IgG4 molecules. While IgG4 molecules are unstable and can exchange light-heavy chain heterodimers with one another, deletion of the hinge region prevents heavy chain-heavy chain pairing entirely, leaving highly specific monovalent light/heavy heterodimers, while retaining the Fc region to ensure stability and half-life in vivo. This configuration can minimize the risk of immune activation or oncogenic growth, as IgG4 interacts poorly with FcRs and monovalent unibodies fail to promote intracellular signaling complex formation (see, e.g., Nelson (2010) Mabs 2:77-83).

[0442] In some embodiments, antibody variants encompassed by the present invention can be single-domain antibodies (sdAbs, or nanobodies). As used herein the term “sdAb” or “nanobody” refers to an antibody fragment consisting of a single monomeric variable antibody domain. Like a whole antibody, it is able to bind selectively to a specific antigen. In one aspect, a sdAb can be a “Camel Ig or “camelid VHH.” As used herein, the term “camel Ig” refers to the smallest known antigen-binding unit of a heavy chain antibody (Koch-No Ite et al (2007) FASEB J. 21:3490-3498). A “heavy chain antibody” or a “camelid antibody” refers to an antibody that contains two VH domains and no light chains (Hamers-Casterman et al. (1993) Nature 363:446-448 (1993); Sheriff et al. (1996) Nat. Struct. Biol. 3:733-736; Riechmann et al (1999). J. Immunol. Meth. 231:25-38; PCT Publ. Numbers WO1 994/04678 and WO 1994/025591; and U.S. Pat. No. 6,005,079). In another aspect, a sdAb can be a “immunoglobulin new antigen receptor” (IgNAR). The term “immunoglobulin new antigen receptor” refers to class of antibodies from the shark immune repertoire that consist of homodimers of one variable new antigen receptor (VNAR) domain and five constant new antigen receptor (CNAR) domains. IgNARs represent some of the smallest known immunoglobulin-based protein scaffolds and are highly stable and possess efficient binding characteristics. The inherent stability can be attributed to both (i) the underlying Ig scaffold, which presents a considerable number of charged and hydrophilic surface exposed residues compared to the conventional antibody VH and VL domains found in murine antibodies; and (ii) stabilizing structural features in the complementary determining region (CDR) loops including inter-loop disulphide bridges, and patterns of intra-loop hydrogen bonds. Other miniaturized antibody fragments can include “complementary determining region peptides” or “CDR peptides.” A CDR peptide (also known as “minimal recognition unit”) is a peptide corresponding to a single complementarity-determining region (CDR), and can be prepared by constructing genes encoding the CDR of an antibody of interest. Such genes are prepared, for example, by using the polymerase chain reaction to synthesize the variable region from RNA of antibody-producing cells (see, e.g., Larrick et al (1991) Methods Ezymol. 2:106).

[0443] Other variants comprising antigen-binding fragments of antibodies can include but are not limited to, disulfide-linked Fvs (sdFv), VL, VH, Camel Ig, V-NAR, VHH, trispecific (Fab₃), bispecific (Fab₂), triabody (trivalent), tetrabody (tetravalent), minibody ((scFv—CH3)₂), bispecific single-chain Fv (Bis-scFv), IgGdeltaCH2, scFv-Fc, (scFv)₂-Fc, affibody, peptide aptamer, avimer or nanobody, or other antigen binding subsequences of an intact immunoglobulin.

[0444] In some embodiments, antibodies encompassed by the present invention can be antibodies as described in U.S. Pat. No. 5,091,513. Such an antibody can include one or more sequences of amino acids constituting a region which behaves as a biosynthetic antibody binding site (BABS). The sites comprise 1) non-covalently associated or disulfide bonded synthetic VH and VL dimers, 2) VH-VL or VL-VH single chains wherein the VH and VL are attached by a polypeptide linker, or 3) individuals VH or VL domains. The binding domains comprise linked CDR and FR regions, which can be derived from separate immunoglobulins. The biosynthetic antibodies can also include other polypeptide sequences which function, e.g., as an enzyme, toxin, binding site, or site of attachment to an immobilization media or radioactive atom. Methods are disclosed for producing the biosynthetic antibodies, for designing BABS having any specificity that can be elicited by in vivo generation of antibody, and for producing analogs thereof.

[0445] In some embodiments, antibodies encompassed by the present invention can be antibodies with antibody acceptor frameworks taught in U.S. Pat. No. 8,399,625. Such antibody acceptor frameworks can be particularly well suited accepting CDRs from an antibody of interest.

[0446] In one embodiment, the antibody can be a conditionally active biologic protein. An antibody can be used to generate a conditionally active biologic protein which are reversibly or irreversibly inactivated at the wild-type normal physiological conditions, as well as to such conditionally active biologic proteins and uses of such conditional active biologic proteins are provided. Such methods and conditionally active proteins are taught in, for example, PCT. Publ. Numbers WO 2015/175375 and WO 2016/036916 and U.S. Pat. Publ. No. 2014/0378660.

[0447] The antibodies, as well as variants and/or fragments thereof, as described herein can be produced using recombinant polynucleotides. In one embodiment, the polynucleotides have a modular design to encode at least one of the antibodies, fragments or variants thereof. As a non-limiting example, the polynucleotide construct can encode any of the following designs: (1) the heavy chain of an antibody, (2) the light chain of an antibody, (3) the heavy and light chain of the antibody, (4) the heavy chain and light chain separated by a linker, (5) the VH1, CH1, CH₂, CH₃ domains, a linker and the light chain or (6) the VH1, CHI, CH₂, CH₃ domains, VL region, and the light chain. Any of these designs can also comprise optional linkers between any domain and/or region. The polynucleotides encompassed by the present invention can be engineered to produce any standard class of immunoglobulins using an antibody described herein or any of its component parts as a starting molecule.

[0448] In some embodiments, antibodies encompassed by the present invention are therapeutic antibodies. As used herein, the term “therapeutic antibody” means an antibody that is effective in treating a disease or disorder in a mammal with or predisposed to the disease or disorder. An antibody can be a cell penetrating antibody, a neutralizing antibody, an agonist antibody, partial agonist, inverse agonist, partial antagonist or an antagonist antibody.

[0449] In some embodiments, antibodies encompassed by the present invention can be naked antibodies. As used herein, the term “naked antibody” is an intact antibody molecule that contains no further modifications such as conjugation with a toxin, or with a chelate for binding to a radionuclide. The Fc portion of the naked antibody can provide effector functions, such as complement fixation and ADCC (antibody dependent cell cytotoxicity), which set mechanisms into action that can result in cell lysis (see, e.g., Markrides (1998) Pharmacol. Rev. 50:59-87).

[0450] In some embodiments, antibodies encompassed by the present invention do not have an ADCC activity against cells expressing a biomarker of interest (e.g., biomarkers listed in Table 1 and/or Table 2). In some embodiments, antibodies encompassed by the present invention do not have a CDC activity against cells expressing a biomarker of interest (e.g., biomarkers listed in Table 1 and/or Table 2). In some embodiments, antibodies encompassed by the present invention are not conjugated to another therapeutic moiety (e.g., a cytotoxic agent). In some embodiments, antibodies encompassed by the present invention do not kill cells expressing a biomarker of interest (e.g., biomarkers listed in Table 1 and/or Table 2) upon binding the cells and/or upon internalization by the cells.

[0451] b. Antibody Generation

[0452] Antibodies encompassed by the present invention can be naturally occurring or man-made through any methods known in the art, such as monoclonal antibodies (mAbs) produced by conventional hybridoma technology, recombinant technology, mutation or optimization of a known antibody, selection from a an antibody library or antibody fragment library, and immunization. The generation of antibodies, whether monoclonal or polyclonal, is well-known in the art. Techniques for the production of antibodies are well-known in the art and described, e.g., in Harlow and Lane “Antibodies, A Laboratory Manual”, Cold Spring Harbor Laboratory Press, 1988; Harlow and Lane “Using Antibodies: A Laboratory Manual” Cold Spring Harbor Laboratory Press, 1999 and “Therapeutic Antibody Engineering: Current and Future Advances Driving the Strongest Growth Area in the Pharmaceutical Industry” Woodhead Publishing, 2012.

[0453] Methods of antibody development typically rely on the use of a target molecule for selection, immunization, and/or confirmation of antibody affinity and/or specificity. Target molecules used according to the present invention include target antigens. Target antigens can be amino acid-based molecules, non-amino acid based molecules, or compounds made up of both amino acid-based molecules and non-amino acid-based molecules. The terms “amino acid” and “amino acids” refer to all naturally occurring L-alpha-amino acids as well as non-naturally occurring amino acids. Amino acids are identified by either the one-letter or three-letter designations as follows: aspartic acid (Asp: D), isoleucine (Ile: I), threonine (Thr: T), leucine (Leu: L), serine (Ser: S), tyrosine (Tyr: Y), glutamic acid (Glu: E), phenylalanine (Phe: F), proline (Pro: P), histidine (His: H), glycine (Gly: G), lysine (Lys: K), alanine (Ala: A), arginine (Arg: R), cysteine (Cys: C), tryptophan (Trp: W), valine (Val: V), glutamine (Gin: Q) methionine (Met: M), and asparagine (Asn: N), where the amino acid is listed first followed parenthetically by the three and one letter codes, respectively. Amino acid-based target antigens can be proteins or peptides. As used herein, the term “peptide” refers to an amino-acid based molecule having from 2 to 50 or more amino acids. Special designators apply to the smaller peptides with “dipeptide” referring to a two amino acid molecule and “tripeptide” referring to a three amino acid molecule. Amino acid based molecules having more than 50 contiguous amino acids are considered polypeptides or proteins.

[0454] In some embodiments, antibodies can be prepared through immunization of a host with one or more target antigens, which act as immunogens to elicit an immunological response. In some cases, only portions or regions of a given antigen can be used. In the case of amino acid-based antigens, one or more antigen-derived polypeptides or peptides (referred to herein as “antigen peptides”) can be used. Antigen peptides suitable for generating antibodies preferably contain a sequence of at least 4, at least 5, at least 6, at least 7, at least 8, at least 9, at least 10, at least 11, at least 12, at least 13, at least 14, at least 15, from about 5 to about 50 amino acids, from about 10 to about 30 amino acids, from about 10 to about 20 amino acids, from about 40 to about 200 amino acids, or at least 200 amino acids in length. In certain embodiments encompassed by the present invention, where larger polypeptides or proteins are used for generating antibodies, these preferably are at least 50, at least 55, at least 60, at least 70, at least 80, at least 90, or more amino acids in length.

[0455] Antibody generation by immunization typically involves the use of non-human animal hosts as subjects for immunization, referred to herein as “immunogenic hosts.” In some embodiments, immunogenic hosts are selected from any vertebrates. In further embodiments, immunogenic hosts are selected from all mammals. In further embodiments, immunogenic hosts are mice, including transgenic or knockout mice. Other immunogenic hosts can include, but are not limited to rats, rabbits, cats, dogs, goats, sheep, hamsters, guinea pigs, cows, horses, pigs, llamas, camels, and chickens.

[0456] Immunization of immunogenic hosts with target antigens described herein can comprise the use of one or more adjuvants. Adjuvants can be used to elicit a higher immune response in such immunogenic hosts. As such, adjuvants used according to the present invention can be selected based on their ability to affect antibody titers. Adjuvants can include, but are not limited to, Freund's (complete and incomplete), mineral gels such as aluminum hydroxide, surface active substances such as lysolecithin, pluronic polyols, polyanions, peptides, oil emulsions, keyhole limpet hemocyanins, dinitrophenol, and other useful human adjuvants such as BCG (Bacillus Calmette-Guerin) and Corynebacterium parvum. Such adjuvants are also well-known in the art. In some embodiments, water-in-oil emulsions can be useful as adjuvants. Water-in-oil emulsions can act by forming mobile antigen depots, facilitating slow antigen release and enhancing antigen presentation to immune components. Freund's adjuvant can be used as complete Freund's adjuvant (CFA), which comprises mycobacterial particles that have been dried and inactivated, or as incomplete Freund's adjuvant (IFA), lacking such particles. Other water-in-oil-based adjuvants include EMULSIGEN® (MVP Technologies, Omaha, Nebr.). EMULSIGEN® comprises micron-sized oil droplets that are free from animal-based components. It can be used alone or in combination with other adjuvants, including, but not limited to aluminum hydroxide and CARBIGEN™ (MVP Technologies, Omaha, Nebr.). In some embodiments, TITERMAX® adjuvant can be used. TITERMAX® is another water-in-oil emulsion comprising squalene, as well as sorbitan monooleate 80 (as an emulsifier) and other components. In some cases, TITERMAX® can provide higher immune responses, but with decreased toxicity toward immunogenic hosts. Immunostimmulatory oligonucleotides can also be used as adjuvants. Such adjuvants can include, for example, CpG oligodeoxynucleotide (ODN) (Chu et al. (2000) Infect. Immunity 68:1450-1456; ODNs can include any of those available commercially, such as ODN-1585, ODN-1668, ODN-1826, ODN-2006, ODN-2007, ODN-2216, ODN-2336, ODN-2395 and/or ODN-M362, each of which can be purchased, for example, from InvivoGen, San Diego, Calif.) or immune stimulating complexes (ISCOMs), which are spherical open cage-like structures (typically nm in diameter) that are spontaneously formed when mixing together cholesterol, phospholipids and Quillaia saponins under a specific stoichiometry (see, for example, AbISCO-100, Isconova, Uppsala, Sweden). According to embodiments encompassed by the present invention, adjuvant components of immunization solutions can be varied in order to achieve desired results. Such results can include modulating the overall level of immune response and/or level of toxicities in immunogenic hosts.

[0457] Monoclonal antibodies encompassed by the present invention can be prepared using well-established methods known by those skilled in the art. In one embodiment, the monoclonal antibodies are prepared using hybridoma technology (Kohler et al. (1975) Nature 256:495-497). In a hybridoma method, a mouse, hamster, or other appropriate immunogenic host animal, is typically immunized with an immunizing agent (e.g., a target antigen) to elicit lymphocytes that produce or are capable of producing antibodies that will specifically bind to the immunizing agent. Alternatively, the lymphocytes can be immunized in vitro. The lymphocytes are then fused with an immortalized cell line using a suitable fusing agent, such as polyethylene glycol, to form a hybridoma cell (Goding, J. W., Monoclonal Antibodies: Principles and Practice. Academic Press. 1986; 59-1031). Immortalized cell lines are usually transformed mammalian cells, particularly myeloma cells of rodent, rabbit, bovine and human origin. Usually, rat or mouse myeloma cell lines are employed. The hybridoma cells can be cultured in a suitable culture medium that preferably contains one or more substances that inhibit the growth or survival of the unfused, immortalized cells. For example, if the parental cells lack the enzyme hypoxanthine guanine phosphoribosyl transferase (HGPRT or HPRT), the culture medium for the hybridomas typically will include hypoxanthine, aminopterin, and thymidine (“HAT medium”), which substances prevent the growth of HGPRT-deficient cells.

[0458] In some embodiment, immortalized cell lines are those that fuse efficiently, support stable high level expression of antibody by the selected antibody-producing cells, and are sensitive to a medium such as HAT medium. Such cell lines can be murine myeloma lines, which can be obtained, for instance, from the Salk Institute Cell Distribution Center, San Diego, Calif. and the American Type Culture Collection, Manassas, Va. Human myeloma and mouse-human heteromyeloma cell lines also have been described for the production of human monoclonal antibodies (Kozbor et al. (1984) J. Immunol. 133:3001-3005; Brodeur, B. et al., Monoclonal Antibody Production Techniques and Applications. Marcel Dekker, Inc., New York. 1987; 33:51-63). The culture medium in which the hybridoma cells are cultured can then be assayed for the presence of monoclonal antibodies. Preferably, the binding specificity (i.e., specific immunoreactivity) of monoclonal antibodies produced by the hybridoma cells is determined by immunoprecipitation or by an in vitro binding assay, such as radioimmunoassay (RIA) or enzyme-linked immunosorbent assay (ELISA). Such techniques and assays are known by those skilled in the art. The binding specificity of the monoclonal antibody can, for example, be determined by Scatchard analysis (Munson (1980) Anal. Biochem. 107:220-239). After the desired hybridoma cells are identified, the clones can be subcloned by limiting dilution procedures and grown by standard methods. Suitable culture media for this purpose include, for example, Dulbecco's Modified Eagle's Medium or RPMI-1640 medium. Alternatively, the hybridoma cells can be grown in vivo as ascites in a mammal. The monoclonal antibodies secreted by the subclones can be isolated or purified from the culture medium or ascites fluid by conventional immunoglobulin purification procedures such as, for example, protein A-Sepharose, hydroxylapatite chromatography, gel electrophoresis, dialysis, or affinity chromatography.

[0459] In some embodiments, monoclonal antibodies encompassed by the present invention can also be made by recombinant DNA methods, such as those described in U.S. Pat. No. 4,816,567. DNA encoding the monoclonal antibodies encompassed by the present invention can be readily isolated and sequenced using conventional procedures (e.g., by using oligonucleotide probes that are capable of binding specifically to genes encoding the heavy and light chains of murine antibodies). The hybridoma cells encompassed by the present invention serve as a preferred source of DNA. Once isolated, the DNA can be placed into expression vectors, which are then transfected into host cells such as simian COS cells, Chinese hamster ovary (CHO) cells, or myeloma cells that do not otherwise produce immunoglobulin protein, to obtain the synthesis of monoclonal antibodies in the recombinant host cells. The DNA also can be modified, for example, by substituting the coding sequence for human heavy and light chain constant domains in place of the homologous murine sequences (see, e.g., U.S. Pat. No. 4,816,567) or by covalently joining the immunoglobulin coding sequence with all or part of the coding sequence for a non-immunoglobulin polypeptide. Such a non-immunoglobulin polypeptide can be substituted for the constant domains of an antibody encompassed by the present invention, or can be substituted for the variable domains of an antibody encompassed by the present invention to create a chimeric bivalent antibody.

[0460] Antibodies encompassed by the present invention can also be produced by various procedures well-known in the art for the production of polyclonal antibodies. Polyclonal antibody production typically involves immunization of immunogenic host animals, such as rabbits, rats, mice, sheep, or goats, with either free or carrier-coupled immunogens (e.g., target antigens), for example, by intraperitoneal and/or intradermal injection. Injection material is typically an emulsion containing about 100 μg of immunogen or carrier protein. Several booster injections can be needed, for instance, at intervals of about two weeks, to provide a useful titer of antibody which can be detected, for example, by ELISA assay using free peptide adsorbed to a solid surface. The titer of antibodies in serum from an immunized animal can be increased by selection of antibodies, e.g., by adsorption of the peptide onto a solid support and elution of the selected antibodies according to methods well-known in the art.

[0461] c. Antibody Selection

[0462] A desired antibody can be selected from a larger pool of two or more candidate antibodies based on affinity and/or specificity for target antigens and/or epitopes thereof. In some embodiments, antibody selection can be carried out using an antibody binding assay. Such assays can include, but are not limited to surface plasmon resonance (SPR)-based assays, ELISAs, and flow cytometry-based assays. Assays can utilize a target antigen to bind a desired antibody and then use one or more detection methods to detect binding.

[0463] In some embodiments, antibodies encompassed by the present invention can be selected and produced using high throughput methods of discovery. In one embodiment, antibodies encompassed by the present invention are produced through the use of display libraries. The term “display” refers to the expression or “display” of proteins or peptides on the surface of a given display host. The term “library” refers to a collection of unique cDNA sequences. A library can contain from as little as two unique cDNAs to hundreds of billions of unique cDNAs. In some embodiments, detection agents comprising synthetic antibodies are produced using antibody display libraries or antibody fragment display libraries. The term “antibody fragment display library” refers to a display library wherein each member encodes an antibody fragment containing at least one variable region of an antibody. Such antibody fragments are preferably Fab fragments, but other antibody fragments such as single-chain variable fragments (scFvs) are contemplated as well. In a Fab antibody fragment library, each Fab encoded can be identical except for the amino acid sequence contained within the variable loops of the complementarity determining regions (CDRs) of the Fab fragment. In an alternative or additional embodiment, amino acid sequences within the individual VH and/or VL regions can differ as well.

[0464] Display libraries can be expressed in a number of possible hosts (referred to herein as “display hosts”) including, but not limited to yeast, bacteriophage (also referred to herein as “phages” or “phage particles,” bacteria and retroviruses. Additional display technologies that can be used include ribosome-display, microbead-display and protein-DNA linkage techniques. When expressed, the Fabs decorate the surface of the host (e.g., phage or yeast) where they can interact with a given target antigen. Any target antigens can be used to select display hosts expressing antibody fragments with the highest affinity for that target. The DNA sequence encoding the variable domains of the bound antibody fragment can then be determined through sequencing using the bound particle or cell. In some embodiments, positive selection is used in the development of antibodies. The term “positive selection” refers to processes by which antibodies and/or fragments thereof are selected from display libraries based on affinity for target antigens containing desirable target sites. In some embodiments, negative selection is utilized in the development of antibodies. The term “negative selection” refers to processes by which non-target agents are used to exclude antibodies and/or fragments thereof from a given display library during antibody development. In some embodiments, both positive and negative selection processes are utilized during multiple rounds of selection in the development of antibodies using display libraries.

[0465] In yeast display, cDNA encoding different antibody fragments are introduced into yeast cells where they are expressed and the antibody fragments are “displayed” on the cell surface as described by Chao et al. (2006) Nat. Protoc. 1:755-768. In yeast surface display, expressed antibody fragments contain an additional domain comprising the yeast agglutinin protein, Aga2p. This domain allows the antibody fragment fusion protein to attach to the outer surface of the yeast cell through the formation of disulfide bonds with surface-expressed Aga1p. The result is a yeast cell, coated in a particular antibody fragment. Display libraries of cDNA encoding these antibody fragments are utilized initially in which the antibody fragments each have a unique sequence. These fusion proteins are expressed on the cell surface of millions of yeast cells where they can interact with a desired targets, incubated with the cells. Target peptides can be covalently or otherwise modified with a chemical or magnetic group to allow for efficient cell sorting after successful binding with a suitable antibody fragment takes place. Recovery can be by way of magnetic-activated cell sorting (MACS), fluorescence-activated cell sorting (FACS) or other cell sorting methods known in the art. Once a subpopulation of yeast cells is selected, the corresponding plasmids can be analyzed to determine the sequence of displayed antibody fragments.

[0466] Bacteriophage display methods typically utilize filamentous phage including fd, F1 and M13 virions. Such strains are non-lytic, allowing for continued propagation of the host and increased viral titers. Examples of phage display methods that can be used to make the antibodies encompassed by the present invention include those disclosed in Miersch et al. (2012) Methods. 57:486-498; Bradbury et al. (2011) Nat. Biotechnol. 29:245-254; Brinkman et al. (1995) J. Immunol. Meth. 182:41-50; Ames et al. (1995) J. Immunol. Meth. 184:177-186; Kettleborough et al. (1994) Eur. J. Immunol. 24:952-958); Persic et al. (1997) Gene 187:9-18); PCT Publ. Numbers PCT/GB91/01134, WO 90/02809, WO 91/10737, WO 92/01047, WO 92/18619, WO 93/11236, WO 95/15982, and WO 95/20401; and U.S. Pat. Nos. 5,698,426; 5,223,409; 5,403,484; 5,580,717; 5,427,908; 5,750,753; 5,821,047; 5,571,698; 5,427,908; 5,516,637; 5,780,225; 5,658,727; 5,733,743 and 5,969,108.

[0467] Antibody fragment expression on bacteriophages can be carried out by inserting the cDNA encoding the fragment into the gene expressing a viral coat protein. The viral coat of filamentous bacteriophages is made up of five coat proteins, encoded by a single-stranded genome. Coat protein pIII is the preferred protein for antibody fragment expression, typically at the N-terminus. If antibody fragment expression compromises the function of pIII, viral function can be restored through coexpression of a wild-type pIII, although such expression will reduce the number of antibody fragments expressed on the viral coat, but can enhance access to the antibody fragment by the target. Expression of viral as well as antibody fragment proteins can alternatively be encoded on multiple plasmids. This method can be used to reduce the overall size of infective plasmids and enhance the transformation efficiency. Phage display libraries can comprise millions to billions of phage particles, each expressing unique antibody fragments on their viral coats. Such libraries can provide richly diverse resources that can be used to select potentially hundreds of antibody fragments with diverse levels of affinity for one or more targets (McCafferty et al. (1990) Nature 348:552-554; Edwards et al. (2003). JMB 334:103-118; Schofield et al. (2007) Genome Biol. 8:R254; and Pershad et al. (2010) Prot. Digin. Design Select. 23:279-288). Often, the antibody fragments present in such libraries comprise scFv antibody fragments, comprising a fusion protein of VH and VL antibody domains joined by a flexible linker (e.g., a Ser/Gly-rich linker). These fragments typically comprise the VH domain first, but VL-linker-VH fragments are also contemplated herein. In some cases, scFvs can contain the same sequence with the exception of unique sequences encoding variable loops of the complementarity determining regions (CDRs). In some cases, scFvs are expressed as fusion proteins, linked to viral coat proteins (e.g., the N-terminus of the viral pIII coat protein). VL chains can be expressed separately for assembly with VH chains in the periplasm prior to complex incorporation into viral coats.

[0468] In some embodiments, phage enrichment comprises solution-phase phage enrichment where target antigens are present in a solution that is combined with phage solutions. According to such methods, target antigens can comprise detectable labels (e.g., biotin labels) to facilitate retrieval from solution and recovery of bound phage. In other embodiments, solution-phase phage enrichment can comprise the use of targets bound to beads (e.g., streptavidin beads). In some cases, such beads can be magnetic beads to facilitate precipitation. In other embodiments, phage enrichment can comprise solid-phase enrichment where target antigens are immobilized on solid surfaces. According to such methods, phage solutions can be used to contact the solid surface for enrichment with the immobilized targets. Solid surfaces can include any surfaces capable of retaining targets and can include, but are not limited to dishes, plates, flasks, membranes, and tubes. In some cases, immunotubes can be used wherein the inner surface of such tubes are coated with target antigens (e.g., by passing biotinylated targets through streptavidin or neutravidin-coated tubes). Phage enrichment with immunotubes can be carried out by passage of phage solution through the tubes to enrich bound targets.

[0469] After selection, bound phage can be used to infect E. coli cultures that are co-infected with helper phage, to produce an amplified output library for the next round of enrichment. This process can be repeated producing narrower and narrower clone sets. In some embodiments, rounds of enrichment are limited to improve the diversity of selected phage. Precipitated library members can be sequenced from the bound phage to obtain cDNA encoding desired scFvs. Such sequences can be directly incorporated into antibody sequences for recombinant antibody production, or mutated and utilized for further optimization through in vitro affinity maturation. IgG antibodies comprising one or more variable domains from selected scFvs can be synthesized for further testing and/or product development. Such antibodies can be produced by insertion of one or more segments of scFv cDNA into expression vectors suited for IgG production.

[0470] d. Antibody Engineering

[0471] As described above, techniques that can be used to produce antibodies and antibody fragments, such as Fabs and scFvs, are well-known in the art and include those described in U.S. Pat. Nos. 4,946,778 and 5,258,498; Miersch et al. (2012) Methods 57:486-498; Chao et al. (2006) Nat. Protoc. 1:755-768), Huston et al. (1991) Methods Enzymol. 203:46-88; Shu et al. (1993) Proc. Natl. Acad. Sci. U.S.A. 90:7995-7999; and Skerra et al. (1988) Science 240:1038-1041).

[0472] After isolation or selection of target antigen-specific antibodies, antibody sequences can be used for recombinant production and/or optimization of such antibodies. In the case of antibody fragment isolation from a display library, coding regions from the isolated fragment can be used to generate whole antibodies, including human antibodies, or any other desired target binding fragment, and expressed in any desired host, including mammalian cells, insect cells, plant cells, yeast, and bacteria, e.g., as described in detail below. If desired, IgG antibodies (e.g., IgG1, IgG2, IgG3 or IgG4) can be synthesized for further testing and/or product development from variable domain fragments produced or selected according to the methods described herein. Such antibodies can be produced by insertion of one or more segments of cDNA encoding desired amino acid sequences into expression vectors suited for IgG production. Expression vectors can comprise mammalian expression vectors suitable for IgG expression in mammalian cells. Mammalian expression of IgGs can be carried out to ensure that antibodies produced comprise modifications (e.g., glycosylation) characteristic of mammalian proteins and/or to ensure that antibody preparations lack endotoxin and/or other contaminants that can be present in protein preparations from bacterial expression systems.

[0473] In some embodiments, affinity maturation is performed. The term “affinity maturation” refers to a method whereby antibodies are produced with increasing affinity for a given target through successive rounds of mutation and selection of antibody- or antibody fragment-encoding cDNA sequences. In some cases, this process is carried out in vitro. To accomplish this, amplification of variable domain sequences (in some cases limited to CDR coding sequences) can be carried out using error-prone PCR to produce millions of copies containing mutations including, but not limited to point mutations, regional mutations, insertional mutations and deletional mutations. As used herein, the term “point mutation” refers to a nucleic acid mutation in which one nucleotide within a nucleotide sequence is changed to a different nucleotide. As used herein, the term “regional mutation” refers to a nucleic acid mutation in which two or more consecutive nucleotides are changed to different nucleotides. As used herein, the term “insertional mutation” refers to a nucleic acid mutation in which one or more nucleotides are inserted into a nucleotide sequence. As used herein, the term “deletional mutation” refers to a nucleic acid mutation in which one or more nucleotides are removed from a nucleotide sequence. Insertional or deletional mutations can include the complete replacement of an entire codon or the change of one codon to another by altering one or two nucleotides of the starting codon.

[0474] Mutagenesis can be carried out on CDR-encoding cDNA sequences to create millions of mutants with singular mutations in heavy and light chain CDR regions. In another approach, random mutations are introduced only at CDR residues most likely to improve affinity. These newly generated mutagenic libraries can be used to repeat the process to screen for clones that encode antibody fragments with even higher affinity for the target peptide. Continued rounds of mutation and selection promote the synthesis of clones with greater and greater affinity (see, e.g., Chao et al. (2006) Nat. Protoc. 1:755-768).

[0475] Affinity matured clones can be selected based on affinity as determined by binding assay (e.g., FACS, ELISA, surface plasmon resonance, etc.). Select clones can then be converted to IgG and tested further for affinity and functional activity. In some cases, the goal of affinity optimization is to increase the affinity by at least 2-fold, at least 3-fold, at least 4-fold, at least 5-fold, at least 6-fold, at least 7-fold, at least 8-fold, at least 9-fold, at least 10-fold, at least 20-fold, at least 30-fold, at least 40-fold, at least 50-fold, at least 100 fold, at least 500-fold or at least 1,000-fold or more as compared to the affinity of the original antibody. In cases where optimized affinity is less than desired, the process can be repeated.

[0476] In some embodiments, generating chimeric and/or humanized antibodies is useful. For example, for some uses, including the in vivo use of antibodies in humans and in vitro detection assays, it can be preferable to use chimeric, humanized, or human antibodies. A chimeric antibody is a molecule in which different portions of the antibody are derived from different animal species, such as antibodies having a variable region derived from a murine monoclonal immunoglobulin and a human immunoglobulin constant region. Methods for producing chimeric antibodies are well-known in the art (see, e.g., Morrison (1985) Science 229:1202-1207; Gillies et al. (1989)J. Immunol. Meth. 125:191-202.; and U.S. Pat. Nos. 5,807,715; 4,816,567; and 4,816,397).

[0477] Humanized antibodies are antibody molecules from non-human species that bind to the desired target and have one or more complementarity determining regions (CDRs) from the nonhuman species and framework regions from a human immunoglobulin molecule. Often, framework residues in the human framework regions are substituted with corresponding residues from the CDR and framework regions of the donor antibody to alter, preferably improve, target binding. These framework substitutions are identified by methods well-known in the art, e.g., by modeling of the interactions of the CDR and framework residues to identify framework residues important for target binding, and by sequence comparison to identify unusual framework residues at particular positions (see, e.g., U.S. Pat. Nos. 5,693,762 and 5,585,089: Riechmann et al. (1988) Nature 332:323-327).

[0478] Antibodies can be humanized using a variety of techniques known in the art, including, for example, CDR-grafting (see, e.g., EP Pat. Publ. No. 239,400; PCT Publ. No. WO 91/09967; U.S. Pat. Nos. 5,225,539; 5,530,101; and 5,585,089); veneering or resurfacing (see, e.g., EP Pat. Publ. No. 592,106; EP Pat. Publ. No. 519,596; Padlan (1991) Mol. Immunol. 28:489-498; Studnicka et al. (1994) Protein Eng. 7:805-814; Roguska et al. (1994) Proc. Natl. Acad. Sc. U.S.A. 91:969-973); and chain shuffling (see, e.g., U.S. Pat. No. 5,565,332).

[0479] Completely human antibodies are particularly desirable for therapeutic treatment of human patients, so as to avoid or alleviate immune reaction to foreign protein. Human antibodies can be made by a variety of methods known in the art, including the antibody display methods described above, using antibody libraries derived from human immunoglobulin sequences (see, e.g., U.S. Pat. Nos. 4,444,887 and 4,716,111; and PCT Publ. Numbers WO 98/46645, WO 98/50433, WO 98/24893, WO 98/16654, WO 96/34096, WO 96/33735, and WO 91/10741). Human antibodies can also be produced using transgenic mice which are incapable of expressing functional endogenous immunoglobulins, but which can express human immunoglobulin polynucleotides. For example, the human heavy and light chain immunoglobulin polynucleotide complexes can be introduced randomly, or by homologous recombination, into mouse embryonic stem cells. Alternatively, the human variable region, constant region, and diversity region can be introduced into mouse embryonic stem cells, in addition to the human heavy and light chain polynucleotides. The mouse heavy and light chain immunoglobulin polynucleotides can be rendered nonfunctional separately or simultaneously with the introduction of human immunoglobulin loci by homologous recombination. In particular, homozygous deletion of the JH region prevents endogenous antibody production. The modified embryonic stem cells are expanded and microinjected into blastocysts to produce chimeric mice. The chimeric mice are then bred to produce homozygous offspring which express human antibodies. The transgenic mice are immunized in the normal fashion with a selected immunogen (e.g., target antigen). Using such a technique, it is possible to produce useful human IgG, IgA, IgM, IgD and IgE antibodies. As illustrated above, methods for producing human antibodies and human monoclonal antibodies and protocols for producing such antibodies are well-known in the art (see also, e.g., PCT Publ. Numbers WO 98/24893, WO 92/01047, WO 96/34096, and WO 96/33735; and U.S. Pat. Nos. 5,413,923; 5,625,126; 5,633,425; 5,569,825; 5,661,016; 5,545,806; 5,814,318; 5,885,793; 5,916,771; 5,939,598; 6,075,181; and 6,114,598).

[0480] Once an antibody molecule encompassed by the present invention has been produced by an animal, a cell line, chemically synthesized, or recombinantly expressed, it can be purified (i.e., isolated) by any method known in the art for the purification of an immunoglobulin or polypeptide molecule, for example, by chromatography (e.g., ion exchange, affinity, particularly by affinity for the specific target, Protein A, and sizing column chromatography), centrifugation, differential solubility, or by any other standard technique for the purification of proteins. In addition, the antibodies encompassed by the present invention or fragments thereof can be fused to heterologous polypeptide sequences described herein or otherwise known in the art, to facilitate purification.

[0481] In accordance with the present invention, antibodies specifically binding to an antigen can be present in a solution or bound to a substrate. In some embodiments, the antibodies are bound to cellulose nanobeads and confined in one or more detection area of a substrate of a detection device.

[0482] e. Antibody Characterization

[0483] Antibodies encompassed by the present invention can be characterized by one or more of characteristic selected from the group consisting of structure, isotype, binding (e.g., affinity and specificity), conjugation, glycosylation, and other distinguishing features.

[0484] Antibodies encompassed by the present invention can be from any animal origin including birds and mammals. Preferably, such antibodies are of human, murine (e.g., mouse and rat), donkey, sheep, rabbit, goat, guinea pig, camel, horse, or chicken origin. Antibodies encompassed by the present invention can be monospecific or multispecific. Multispecific antibodies can be specific for different epitopes of a peptide encompassed by the present invention, or can be specific for both a peptide encompassed by the present invention, and a heterologous epitope, such as a heterologous peptide or solid support material (see, e.g., PCT Publ. Numbers WO 93/17715, WO 92/08802, WO 91/00360, and WO 92/05793; Tutt et al. (1991). Immunol. 147:60-69; U.S. Pat. Nos. 4,474,893; 4,714,681; 4,925,648; 5,573,920; and 5,601,819; and Kostelny et al. (1992)J. Immunol. 148:1547-1553). For example, the antibodies can be produced against a peptide containing repeated units of a peptide sequence encompassed by the present invention, or they can be produced against a peptide containing two or more peptide sequences encompassed by the present invention, or the combination thereof. As a non-limiting example, a heterobivalent ligand (HBL) system that competitively inhibits antigen binding to mast cell bound IgE antibody, thereby inhibiting mast cell degranulation, has been designed (Handlogten et al. (2011) Chem. Biol. 18:1179-1188).

[0485] Antibody characteristics can be determined relative to a standard under normal physiologic conditions, either in vitro or in vivo. Measurements can also be made relative to the presence or absence of the antibodies. Such methods of measuring include standard measurement in tissue or fluids such as serum or blood such as Western blot, enzyme-linked immunosorbent assay (ELISA), activity assays, reporter assays, luciferase assays, polymerase chain reaction (PCR) arrays, gene arrays, real time reverse transcriptase (RT) PCR and the like.

[0486] Antibodies can bind or interact with any number of locations on or along a target protein. Antibody target sites contemplated include any and all possible sites on the target protein. Antibodies can be selected for their ability to bind (reversibly or irreversibly) to one or more epitopes on a specific target. Epitopes on targets can include, but are not limited to, one or more feature, region, domain, chemical group, functional group, or moiety. Such epitopes can be made up of one or more atom, group of atoms, atomic structure, molecular structure, cyclic structure, hydrophobic structure, hydrophilic structure, sugar, lipid, amino acid, peptide, glycopeptide, nucleic acid molecule, or any other antigen structure.

[0487] f. Antibody Conjugates

[0488] In some embodiments, antibodies encompassed by the present invention can be conjugated with one or more detectable label for purposes of detection according to methods well-known in the art. The label can be a radioisotope, fluorescent compound, chemiluminescent compound, enzyme, or enzyme co-factor, or any other labels known in the art. In some embodiments, the antibody that binds to a desired target (also referred to herein as a “primary antibody”) is not labeled, but can be detected by binding of a second antibody that specifically binds to the primary antibody (referred to herein as a “secondary antibody”). According to such methods, the secondary antibody can include a detectable labeled.

[0489] In some embodiments, enzymes that can be attached to antibodies can include, but are not limited to horseradish peroxidase (HRP), alkaline phosphatase, and glucose oxidase (GOx). Fluorescent compounds can include, but are not limited to, ethidium bromide; fluorescein and derivatives thereof (e.g., FITC); cyanine and derivatives thereof (e.g., indocarbocyanine, oxacarbocyanine, thiacarbocyanine, and merocyanine); rhodamine; oregon green; eosin; texas red; nile red; nile blue: cresyl violet; oxazine 170; proflavin; acridine orange; acridine yellow; auramine; crystal violet; malachite green; porphin; phthalocyanine; bilirubin; allophycocyanin (APC); green fluorescent protein (GFP) and variants thereof (e.g., yellow fluorescent protein YFP, blue fluorescent protein BFP, and cyan fluorescent protein CFP); ALEXIFLOUR® compounds (Thermo Fisher Scientific, Waltham, Mass.); and quantum dots. Other conjugates that can be used to label antibodies can include biotin, avidin, and streptavidin.

[0490] In some embodiments, the present invention encompasses antibody-drug conjugate (ADCs) agents. ADCs are conjugates of an antibody with another moiety such that the agent has targeting ability conferred by the antibody and an additional effect conferred by the moiety. For example, a cytotoxic drug can be tethered to a monoclonal antibody that targets the drug to a cell of interest that contribute to disease progression (e.g., tumor progression) and, upon internalization, releases its toxic payload to the cell. Different effects are achieved based on the conjugated moiety as described above.

[0491] 4. Small Molecule Agents

[0492] In another aspect, small molecule agents are encompassed by the present invention. The small molecule can be an inhibitor, an activator, or a modulator of a biomarker described herein (e.g., one or more targets listed in Table 1 and/or Table 2). The term “small molecule” refers to a low molecular weight (i.e., less than about 900 Daltons) organic compound with a size on the order of 10⁻⁹ m that can help regulate a biological process. In some embodiments, the small molecules can be inhibitors of enzymes (e.g., kinases and transcription factors).

[0493] Small molecules can also include crystalline and amorphous forms of those compounds, including, for example, polymorphs, pseudopolymorphs, solvates, hydrates, unsolvated polymorphs (including anhydrates), conformational polymorphs, and amorphous forms of the compounds, as well as mixtures thereof. The terms “crystalline form” and “polymorph” are intended to include all crystalline and amorphous forms of the compound, including, for example, polymorphs, pseudopolymorphs, solvates, hydrates, unsolvated polymorphs (including anhydrates), conformational polymorphs, and amorphous forms, as well as mixtures thereof, unless a particular crystalline or amorphous form is intended.

[0494] Known small molecules that bind to and modulate target genes and/or gene products, as well as information regarding the affected biological activities and pathways can be readily determined from publicly available databases, such as Drugbank, PharmGKB, MedChemExpress, and Selleckchem.

[0495] 5. Cell-Based Agents

[0496] In another aspect, cell-based agents are contemplated. In some embodiments, monocytes and/or macrophages are manipulated, such as being contacted with one or more agents to modulate one or more biomarkers encompassed by the present invention (e.g., one or more targets listed in Table 1 and/or Table 2). For example, cultured cells and/or primary cells can be contacted with agents, processed, and introduced into assays, subjects, and the like. Progeny of such cells are encompassed by the cell-based agents described herein.

[0497] In some embodiments, monocytes and/or macrophages are recombinantly engineered to modulate one or more biomarkers encompassed by the present invention (e.g., one or more targets listed in Table 1 and/or Table 2). For example, as describe above, genome editing can be used to modulate the copy number or genetic sequence of a biomarker of interest, such as constitutive or induced knockout or mutation of a biomarker of interest. For example, the CRISPR-Cas system can be used for precise editing of genomic nucleic acids (e.g., for creating non-functional or null mutations). In such embodiments, the CRISPR guide RNA and/or the Cas enzyme can be expressed. For example, a vector containing only the guide RNA can be administered to an animal or cells transgenic for the Cas9 enzyme. Similar strategies can be used (e.g., zinc finger nucleases (ZFNs), transcription activator-like effector nucleases (TALENs), or homing meganucleases (HEs), such as MegaTAL, MegaTev, Tev-mTALEN, CPF1, and the like). Such systems are well-known in the art (see, for example, U.S. Pat. No. 8,697,359; Sander and Joung (2014) Nat. Biotech. 32:347-355; Hale et al. (2009) Cell 139:945-956; Karginov and Hannon (2010)Mol. Cell 37:7; U.S. Pat. Publ. Numbers 2014/0087426 and 2012/0178169; Boch et al. (2011) Nat. Biotech. 29:135-136; Boch et al. (2009) Science 326:1509-1512; Moscou and Bogdanove (2009) Science 326:1501; Weber et al. (2011) PLoS One 6:e19722; Li et al. (2011) Nucl. Acids Res. 39:6315-6325; Zhang et al. (2011) Nat. Biotech. 29:149-153; Miller et al. (2011) Nat. Biotech. 29:143-148; Lin et al. (2014) Nucl. Acids Res. 42:e47). Such genetic strategies can use constitutive expression systems or inducible expression systems according to well-known methods in the art.

[0498] Cell-based agents have an immunocompatibility relationship to a subject host and any such relationship is contemplated for use according to the present invention. For example, the cells, such as adoptive monocytes and/or macrophages, T cells, and the like, can be syngeneic. The term “syngeneic” can refer to the state of deriving from, originating in, or being members of the same species that are genetically identical, particularly with respect to antigens or immunological reactions. These include identical twins having matching MHC types. Thus, a “syngeneic transplant” refers to transfer of cells from a donor to a recipient who is genetically identical to the donor or is sufficiently immunologically compatible as to allow for transplantation without an undesired adverse immunogenic response (e.g., such as one that would work against interpretation of immunological screen results described herein).

[0499] A syngeneic transplant can be “autologous” if the transferred cells are obtained from and transplanted to the same subject. An “autologous transplant” refers to the harvesting and reinfusion or transplant of a subject's own cells or organs. Exclusive or supplemental use of autologous cells can eliminate or reduce many adverse effects of administration of the cells back to the host, particular graft versus host reaction.

[0500] A syngeneic transplant can be “matched allogeneic” if the transferred cells are obtained from and transplanted to different members of the same species yet have sufficiently matched major histocompatibility complex (MHC) antigens to avoid an adverse immunogenic response. Determining the degree of MHC mismatch can be accomplished according to standard tests known and used in the art. For instance, there are at least six major categories of MHC genes in humans, identified as being important in transplant biology. HLA-A, HLA-B, HLA-C encode the HLA class I proteins while HLA-DR, HLA-DQ, and HLA-DP encode the HLA class I1 proteins. Genes within each of these groups are highly polymorphic, as reflected in the numerous HLA alleles or variants found in the human population, and differences in these groups between individuals is associated with the strength of the immune response against transplanted cells. Standard methods for determining the degree of MHC match examine alleles within HLA-B and HLA-DR, or HLA-A, HLA-B and HLA-DR groups. Thus, tests can be made of at least 4, and even 5 or 6 MHC antigens within the two or three HLA groups, respectively. In serological MHC tests, antibodies directed against each HLA antigen type are reacted with cells from one subject (e.g., donor) to determine the presence or absence of certain MIHC antigens that react with the antibodies. This is compared to the reactivity profile of the other subject (e.g., recipient). Reaction of the antibody with an MHC antigen is typically determined by incubating the antibody with cells, and then adding complement to induce cell lysis (i.e., lymphocytotoxicity testing). The reaction is examined and graded according to the amount of cells lysed in the reaction (see, for example, Mickelson and Petersdorf (1999) Hematopoietic Cell Transplantation, Thomas, E. D. et al. eds., pg 28-37, Blackwell Scientific, Malden, Mass.). Other cell-based assays include flow cytometry using labeled antibodies or enzyme linked immunoassays (ELISA). Molecular methods for determining MHC type are well-known and generally employ synthetic probes and/or primers to detect specific gene sequences that encode the HLA protein. Synthetic oligonucleotides can be used as hybridization probes to detect restriction fragment length polymorphisms associated with particular HLA types (Vaughn (2002) Method. Mol. Biol. MHC Protocol. 210:45-60). Alternatively, primers can be used for amplifying the HLA sequences (e.g., by polymerase chain reaction or ligation chain reaction), the products of which can be further examined by direct DNA sequencing, restriction fragment polymorphism analysis (RFLP), or hybridization with a series of sequence specific oligonucleotide primers (SSOP) (Petersdorf et al. (1998) Blood 92:3515-3520; Morishima et al. (2002) Blood 99:4200-4206; and Middleton and Williams (2002) Method. Mol. Biol. MHC Protocol. 210:67-112).

[0501] A syngeneic transplant can be “congenic” if the transferred cells and cells of the subject differ in defined loci, such as a single locus, typically by inbreeding. The term “congenic” refers to deriving from, originating in, or being members of the same species, where the members are genetically identical except for a small genetic region, typically a single genetic locus (i.e., a single gene). A “congenic transplant” refers to transfer of cells or organs from a donor to a recipient, where the recipient is genetically identical to the donor except for a single genetic locus. For example, CD45 exists in several allelic forms and congenic mouse lines exist in which the mouse lines differ with respect to whether the CD45.1 or CD45.2 allelic versions are expressed.

[0502] By contrast, “mismatched allogeneic” refers to deriving from, originating in, or being members of the same species having non-identical major histocompatibility complex (MHC) antigens (i.e., proteins) as typically determined by standard assays used in the art, such as serological or molecular analysis of a defined number of MHC antigens, sufficient to elicit adverse immunogenic responses. A “partial mismatch” refers to partial match of the MHC antigens tested between members, typically between a donor and recipient. For instance, a “half mismatch” refers to 50% of the MHC antigens tested as showing different MHC antigen type between two members. A “full” or “complete” mismatch refers to all MHC antigens tested as being different between two members.

[0503] Similarly, in contrast, “xenogeneic” refers to deriving from, originating in, or being members of different species, e.g., human and rodent, human and swine, human and chimpanzee, etc. A “xenogeneic transplant” refers to transfer of cells or organs from a donor to a recipient where the recipient is a species different from that of the donor.

[0504] In addition, cells can be obtained from a single source or a plurality of sources (e.g., a single subject or a plurality of subjects). A plurality refers to at least two (e.g., more than one). In still another embodiment, the non-human mammal is a mouse. The animals from which cell types of interest are obtained can be adult, newborn (e.g., less than 48 hours old), immature, or in utero. Cell types of interest can be primary cancer cells, cancer stem cells, established cancer cell lines, immortalized primary cancer cells, and the like. In certain embodiments, the immune systems of host subjects can be engineered or otherwise elected to be immunological compatible with transplanted cancer cells. For example, in one embodiment, the subject can be “humanized” in order to be compatible with human cancer cells. The term “immune-system humanized” refers to an animal, such as a mouse, comprising human HSC lineage cells and human acquired and innate immune cells, survive without being rejected from the host animal, thereby allowing human hematopoiesis and both acquired and innate immunity to be reconstituted in the host animal. Acquired immune cells include T cells and B cells. Innate immune cells include macrophages, granulocytes (basophils, eosinophils, neutrophils), DCs, NK cells and mast cells. Representative, non-limiting examples include SCID-hu, Hu-PBL-SCID, Hu-SRC-SCID, NSG (NOD-SCID IL2r-gamma(null) lack an innate immune system, B cells, T cells, and cytokine signaling), NOG (NOD-SCID IL2r-gamma(truncated)), BRG (BALB/c-Rag2(null)IL2r-gamma(null)), and H2dRG (Stock-H2d-Rag2(null)IL2r-gamma(null)) mice (see, for example, Shultz et al. (2007) Nat. Rev. Immunol. 7:118; Pearson et al. (2008) Curr. Protocol. Immunol. 15:21; Brehm et al. (2010) Clin. Immunol. 135:84-98; McCune et al. (1988) Science 241:1632-1639, U.S. Pat. No. 7,960,175, and U.S. Pat. Publ. No. 2006/0161996), as well as related null mutants of immune-related genes like Rag1 (lack B and T cells), Rag2 (lack B and T cells), TCR alpha (lack T cells), perforin (cD8+ T cells lack cytotoxic function), FoxP3 (lack functional CD4+T regulatory cells), IL2rg, or Prf1, as well as mutants or knockouts of PD-1, PD-L1, Tim3, and/or 2B4, allow for efficient engrafiment of human immune cells in and/or provide compartment-specific models of immunocompromised animals like mice (see, for example, PCT Publ. No. WO 2013/062134). In addition, NSG-CD34+(NOD-SCID IL2r-gamma(null) CD34+) humanized mice are useful for studying human gene and tumor activity in animal models like mice.

[0505] As used herein, “obtained” from a biological material source means any conventional method of harvesting or partitioning a source of biological material from a donor. For example, biological material can obtained from a solid tumor, a blood sample, such as a peripheral or cord blood sample, or harvested from another body fluid, such as bone marrow or amniotic fluid. Methods for obtaining such samples are well-known to the artisan. In the present invention, the samples can be fresh (i.e., obtained from a donor without freezing). Moreover, the samples can be further manipulated to remove extraneous or unwanted components prior to expansion. The samples can also be obtained from a preserved stock. For example, in the case of cell lines or fluids, such as peripheral or cord blood, the samples can be withdrawn from a cryogenically or otherwise preserved bank of such cell lines or fluid. Such samples can be obtained from any suitable donor.

[0506] The obtained populations of cells can be used directly or frozen for use at a later date. A variety of mediums and protocols for cryopreservation are known in the art. Generally, the freezing medium will comprise DMSO from about 5-10%, 10-90/serum albumin, and 50-90% culture medium. Other additives useful for preserving cells include, by way of example and not limitation, disaccharides such as trehalose (Scheinkonig et al. (2004) Bone Marrow Dransplant. 34:531-536), or a plasma volume expander, such as hetastarch (i.e., hydroxyethyl starch). In some embodiments, isotonic buffer solutions, such as phosphate-buffered saline, can be used. An exemplary cryopreservative composition has cell-culture medium with 4% HSA, 7.5% dimethyl sulfoxide (DMSO), and 2% hetastarch. Other compositions and methods for cryopreservation are well-known and described in the art (see, e.g., Broxmeyer et al. (2003) Proc. Natl. Acad. Sci. U.S.A. 100:645-650). Cells are preserved at a final temperature of less than about −135° C.

[0507] In some embodiments, the immunotherapy can be CAR (chimeric antigen receptor)-T therapy, where T cells engineered to express CARs comprising an antigen-binding domain specific to an antigen on tumor cells of interest. The term “chimeric antigen receptor” or “CAR” refers to receptors having a desired antigen specificity and signaling domains to propagate intracellular signals upon antigen binding. For example, T lymphocytes recognize specific antigens through interaction of the T cell receptor (TCR) with short peptides presented by major histocompatibility complex (MHC) class I or II molecules. For initial activation and clonal expansion, naive T cells are dependent on professional antigen-presenting cells (APCs) that provide additional co-stimulatory signals. TCR activation in the absence of co-stimulation can result in unresponsiveness and clonal anergy. To bypass immunization, different approaches for the derivation of cytotoxic effector cells with grafted recognition specificity have been developed. CARs have been constructed that consist of binding domains derived from natural ligands or antibodies specific for cell-surface components of the TCR-associated CD3 complex. Upon antigen binding, such chimeric antigen receptors link to endogenous signaling pathways in the effector cell and generate activating signals similar to those initiated by the TCR complex. Since the first reports on chimeric antigen receptors, this concept has steadily been refined and the molecular design of chimeric receptors has been optimized and routinely use any number of well-known binding domains, such as scFV, Fav, and another protein binding fragments described herein.

[0508] In some embodiments, monocytes and macrophages can be engineered to, for example, express a chimeric antigen receptor (CAR). The modified cell can be recruited to the tumor microenvironment where it acts as a potent immune effector by infiltrating the tumor and killing target cancer cells. The CAR includes an antigen binding domain, a transmembrane domain and an intracellular domain. The antigen binding domain binds to an antigen on a target cell. Examples of cell surface markers that can act as an antigen that binds to the antigen binding domain of the CAR include those associated with viral, bacterial, parasitic infections, autoimmune disease and cancer cells (e.g., tumor antigens).

[0509] In one embodiment, the antigen binding domain binds to a tumor antigen, such as an antigen that is specific for a tumor or cancer of interest. Non-limiting examples of tumor associated antigens include BCMA, CD19, CD24, CD33, CD38; CD44v6, CD123, CD22, CD30, CD117, CD171, CEA, CS-1, CLL-1, EGFR, ERBB2, EGFRvill, FLT3, GD2, NY-BR-1, NY-ESO-1, p53, PRSS21, PSMA, ROR1, TAG72, Tn Ag, VEGFR2.

[0510] In one embodiment, the transmembrane domain is naturally associated with one or more of the domains in the CAR. The transmembrane domain can be derived either from a natural or from a synthetic source. Transmembrane regions of particular use in this invention can be derived from (i.e. comprise at least the transmembrane region(s) of) the alpha, beta or zeta chain of the T-cell receptor, CD28, CD3 epsilon, CD45, CD4, CD5, CD8, CD9, CD 16, CD22, CD33, CD37, CD64, CD80, CD86, CD134, CD137, CD154, Toll-like receptor 1 (TLR1), TLR2, TLR3, TLR4, TLR5, TLR6, TLR7, TLR8, and TLR9. In some instances, a variety of human hinges can be employed as well including the human Ig (immunoglobulin) hinge.

[0511] In one embodiment, the intracellular domain of the CAR includes a domain responsible for signal activation and/or transduction. Examples of the intracellular domain include a fragment or domain from one or more molecules or receptors including, but are not limited to, TCR, CD3 zeta, CD3 gamma, CD3 delta, CD3 epsilon, CD86, common FcR gamma, FcR beta (Fc Epsilon Rib), CD79a, CD79b, Fcgamma RIIa, DAP10, DAP 12, T cell receptor (TCR), CD27, CD28, 4-1BB (CD137), OX40, CD30, CD40, PD-1, ICOS, lymphocyte function-associated antigen-1 (LFA-1), CD2, CD7, LIGHT, NKG2C, B7-H3, a ligand that specifically binds with CD83, CDS, ICAM-1, GITR, BAFFR, HVEM (LIGHTR), SLAMF7, NKp80 (KLRF1), CD127, CD160, CD19, CD4, CD8alpha, CD8beta, IL2R beta, IL2R gamma, IL7R alpha, ITGA4, VLA, CD49a, ITGA4, IA4, CD49D, ITGA6, VLA-6, CD49f, ITGAD, CD 1 id, ITGAE, CD103, ITGAL, CD11a, LFA-1, ITGAM, CD11b, ITGAX, CD11c, ITGB1, CD29, ITGB2, CD18, LFA-1, ITGB7, TNFR2, TRANCE/RANKL, DNAM1 (CD226), SLAMF4 (CD244, 2B4), CD84, CD96 (Tactile), CEACAM1, CRTAM, Ly9 (CD229), CD160 (BY55), PSGL1, CD100 (SEMA4D), CD69, SLAMF6 (NTB-A, Ly08), SLAM (SLAMF1, CD150, IPO-3), BLAME (SLAMF8), SELPLG (CD 162), LTBR, LAT, GADS, SLP-76, PAG/Cbp, NKp44, NKp30, NKp46, NKG2D, Toll-like receptor 1 (TLR1), TLR2, TLR3, TLR4, TLR5, TLR6, TLR7, TLR8, TLR9, other co-stimulatory molecules described herein, any derivative, variant, or fragment thereof, any synthetic sequence of a co-stimulatory molecule that has the same functional capability, and any combination thereof.

[0512] In some embodiments, agents, compositions and methods encompassed by the present invention can be used to re-engineer monocytes and macrophages to increase their ability to present antigens to other immune effector cells, for example, T cells. Engineered monocytes and macrophages as antigen presenting cells (APCs) will process tumor antigens and present antigenic epitopes to T cells to stimulate adaptive immune responses to attack tumor cells.

### V. Uses and Methods

[0513] The compositions and agents described herein can be used in a variety of modulatory, therapeutic, screening, diagnostic, prognostic, and therapeutic applications regarding biomarkers described herein (e.g., one or more targets listed in Table 1 and/or Table 2). In any method described herein, such as a modulatory method, therapeutic method, screening method, diagnostic method, prognostic method, or combination thereof, all steps of the method can be performed by a single actor or, alternatively, by more than one actor. For example, diagnosis can be performed directly by the actor providing therapeutic treatment. Alternatively, a person providing a therapeutic agent can request that a diagnostic assay be performed. The diagnostician and/or the therapeutic interventionist can interpret the diagnostic assay results to determine a therapeutic strategy. Similarly, such alternative processes can apply to other assays, such as prognostic assays.

[0514] In addition, any aspect of the present invention described herein can be performed either alone or in combination with any other aspect of the present invention, including one, more than one, or all embodiments thereof. For example, diagnostic and/or screening methods can be performed alone or in combination with a treatment step, such as providing an appropriate therapy upon determining an appropriate diagnosis and/or screening result.

[0515] 1. Modulatory and Treatment Methods

[0516] One aspect encompassed by the present invention relates to methods of modulating the copy number, amount (e.g., expression), and/or activity (e.g., modulating subcellular localization) of at least one biomarker (e.g., one or more targets listed in Table 1, Table 2, the Examples, etc.) described herein, such as for therapeutic purposes. Such agents can be used to manipulate a particular subpopulation of monocytes and/or macrophages and regulate their numbers and/or activities in a physiological condition, and uses thereof for treating macrophages associated diseases and other clinical conditions. For example, agents, including compositions and pharmaceutical formulations, encompassed by the present invention can modulate the copy number, amount, and/or activity of biomarkers (e.g., at least one target listed in Table 1, Table 2, the Examples, etc.) to thereby modulate the inflammatory phenotype of monocytes and/or macrophages and further modulate immune responses. In some embodiments, cell activities (e.g., cytokine secretion, cell population ratios, etc.) are modulated rather than modulating immune responses per se. Methods for modulating monocyte and macrophage inflammatory phenotypes using the agents, compositions, and formulations disclosed herein, are provided. Accordingly, the agents, compositions and methods can be used for modulating immune responses by modulating the copy number, amount, and/or activity of biomarkers (e.g., at least one target listed in Table 1, Table 2, the Examples, etc.) depletes or enriches for certain types of cells and/or to modulate the ratio of cell types. For example, certain targets listed in Table 1 and/or Table 2 are required for cell survival such that inhibiting the target leads to cell death. Such modulation can be useful for modulating immune responses because the ratio of cell types (e.g., pro-inflammatory versus anti-inflammatory cells) mediating immune responses is modulated. In some embodiments, the agents are used to treat cancer in a subject afflicted with a cancer.

[0517] The present disclosure demonstrates that the downregulation of the expression of these genes in macrophages can re-polarize (e.g., change the phenotype of) the macrophages. In some embodiments, the phenotype of an M2 macrophage is changed to result in a macrophage with a Type 1 (M2-like) or M1 phenotype, or vice versa regarding M1 macrophages and Type 2 (M2-like) or M2 phenotypes. In some embodiments, agents encompassed by the present invention are used to modulate (e.g., inhibit) the trafficking, polarization, and/or activation of monocytes and macrophages with an M2 phenotype, or vice versa regarding Type 1 and M1 macrophages. The present invention further provides method for reducing populations of monocytes and/or macrophages of interest, such as M1 macrophages, M2 macrophages (e.g., TAMs in a tumor), and the like.

[0518] In some embodiments, the present invention provides methods for changing the distribution of monocytes and/or macrophages, including subtypes thereof, such as pro-tumoral macrophages and anti-tumoral macrophages. In one example, the present invention provides methods for driving macrophages towards a pro-inflammatory immune response from an anti-inflammatory immune response and vice versa. Cell types can be depleted and/or enriched by 5%, 10%, 15%, 20%, 25%, 30%, 35%, 40%, 45%, 50%, 55%, 60%, 65%, 70%, 75%, 80%, 85%, 90%, 95%, 99%, or more, or any range in between inclusive, such as 45-55%.

[0519] In some embodiments, the modulation occurs in cells, such as monocyte, macrophage, or other phagocyte, like a dendritic cell. In some embodiments, the cell is a macrophage subtype, such as a macrophage subtype described herein. For example, the macrophage can be a tissue resident macrophage (TAM) or a macrophage derived from a circulating monocyte in the bloodstream.

[0520] In some embodiments, modulating monocyte and/or macrophage inflammatory phenotypes results in desired modulated immune responses, such as modulation of abnormal monocyte migration and proliferation, unregulated proliferation of tissue resident macrophages, unregulated pro-inflammatory macrophages, unregulated anti-inflammatory macrophages, unbalanced distribution of pro-inflammatory and anti-inflammatory macrophage subpopulations in a tissue, an abnormally adopted activation state of monocytes and macrophages in a disease condition, modulated cytotoxic T-cell activation and function, overcoming of resistance of cancer cells to therapy, and sensitivity of cancer cells to immunotherapy, such as immune checkpoint therapy. In some embodiments, such phenotypes are reversed.

[0521] Methods for treating and/or preventing a disease associated with monocytes and macrophages comprise contacting cells, either in vitro, ex vivo, or in vivo (e.g., administering to a subject), with agents and compositions encompassed by the present invention, wherein the agents and compositions manipulate the migration, recruitment, differentiation and polarization, activation, function, and/or survival of monocytes and macrophages. In some embodiments, modulating one or more biomarkers encompassed by the present invention is used to modulate (e.g., inhibit or deplete) the proliferation, recruitment, polarization, and/or activation of monocytes and macrophages in a tissue microenvironment, such as tumor tissue.

[0522] In one aspect encompassed by the present invention, methods for reducing anti-inflammatory activities of monocytes and/or macrophages are provided.

[0523] In another aspect encompassed by the present invention, methods for increasing pro-inflammatory activities of monocytes and/or macrophages are provided.

[0524] In another aspect encompassed by the present invention, methods for balancing pro-inflammatory monocytes and macrophages and anti-inflammatory monocytes and macrophages in a tissue are provided.

[0525] Modulatory methods encompassed by the present invention involve contacting a cell with one or more modulators of a biomarker encompassed by the present invention, including at least one biomarker (e.g., at least one target listed in Table 1 and/or Table 2) encompassed by the present invention, including at least one biomarker (e.g., at least one target listed in Table 1 and/or Table 2) listed in Table 1, Table 2, and the Examples, or a fragment thereof or agent that modulates one or more of the activities of biomarker activity associated with the cell. An agent that modulates biomarker activity can be an agent as described herein, such as a nucleic acid or a polypeptide, a naturally-occurring binding partner of the biomarker, an antibody against the biomarker, a combination of antibodies against the biomarker and antibodies against other immune related targets, at least one biomarker (e.g., at least one target listed in Table 1 and/or Table 2) agonist or antagonist, a peptidomimetic of at least one biomarker (e.g, at least one target listed in Table 1 and/or Table 2) agonist or antagonist, at least one biomarker (e.g., at least one target listed in Table 1 and/or Table 2) peptidomimetic, other small molecule, or small RNA directed against or a mimic of at least one biomarker (e.g., at least one target listed in Table 1 and/or Table 2) nucleic acid gene expression product.

[0526] An agent that modulates the expression of at least one biomarker (e.g., at least one target listed in Table 1 and/or Table 2) encompassed by the present invention, including at least one biomarker (e.g., at least one target listed in Table 1 and/or Table 2) encompassed by the present invention, including at least one biomarker (e.g., at least one target listed in Table 1 and/or Table 2) listed in Table 1, Table 2, and the Examples, or a fragment thereof is, e.g., an antisense nucleic acid molecule, RNAi molecule, shRNA, mature miRNA, pre-miRNA, pri-miRNA, miRNA*, anti-miRNA, or a miRNA binding site, or a variant thereof, or other small RNA molecule, triplex oligonucleotide, ribozyme, or recombinant vector for expression of at least one biomarker (e.g., at least one target listed in Table 1 and/or Table 2) polypeptide. For example, an oligonucleotide complementary to the area around at least one biomarker (e.g., at least one target listed in Table 1 and/or Table 2) polypeptide translation initiation site can be synthesized. One or more antisense oligonucleotides can be added to cell media, typically at 200 μg/ml, or administered to a patient to prevent the synthesis of at least one biomarker (e.g., at least one target listed in Table 1 and/or Table 2) polypeptide. The antisense oligonucleotide is taken up by cells and hybridizes to at least one biomarker (e.g, at least one target listed in Table 1 and/or Table 2) mRNA to prevent translation. Alternatively, an oligonucleotide which binds double-stranded DNA to form a triplex construct to prevent DNA unwinding and transcription can be used. As a result of either, synthesis of biomarker polypeptide is blocked. When biomarker expression is modulated, such modulation can occur by a means other than by knocking out the biomarker gene.

[0527] Agents that modulate expression, by virtue of the fact that they control the amount of biomarker in a cell, also modulate the total amount of biomarker activity in a cell.

[0528] In one embodiment, the agent stimulates one or more activities of at least one biomarker (e.g., at least one target listed in Table 1 and/or Table 2) encompassed by the present invention, including at least one biomarker (e.g., at least one target listed in Table 1 and/or Table 2) listed in Table 1 and the Examples or a fragment thereof. Examples of such stimulatory agents include active biomarker polypeptide or a fragment thereof and a nucleic acid molecule encoding the biomarker or a fragment thereof that has been introduced into the cell (e.g., cDNA, mRNA, shRNAs, siRNAs, small RNAs, mature miRNA, pre-miRNA, pri-miRNA, miRNA*, anti-miRNA, or a miRNA binding site, or a variant thereof, or other functionally equivalent molecule known to a skilled artisan). In another embodiment, the agent inhibits one or more biomarker activities. In one embodiment, the agent inhibits or enhances the interaction of the biomarker with its natural binding partner(s). Examples of such inhibitory agents include antisense nucleic acid molecules, anti-biomarker antibodies, biomarker inhibitors, and compounds identified in the screening assays described herein.

[0529] In some embodiments, the one or more biomarkers is one or more, two or more, three or more, four or more, etc. up to and including all of the biomarkers described herein and any range in between, such as 2-4 targets listed in Table 1 and/or Table 2.

[0530] These modulatory methods can be performed in vitro (e.g., by contacting the cell with the agent) or, alternatively, by contacting an agent with cells in vivo (e.g., by administering the agent to a subject). In some embodiments, agents, compositions and methods encompassed by the present invention can be used to modulate monocytes and/or macrophages during vaccination. Vaccine protection often requires the induction of pro-inflammatory cytokines. One potential therapeutic intervention can be to manipulate monocyte and/or macrophage populations during vaccination, for example, to minimize the induction of regulatory macrophages.

[0531] a. Subjects

[0532] The present invention provides methods of treating an individual afflicted with a condition or disorder that would benefit from up- or down-modulation of at least one biomarker (e.g., at least one target listed in Table 1 and/or Table 2) encompassed by the present invention listed in Table 1 and/or Table 2 and the Examples or a fragment thereof, e.g., a disorder characterized by unwanted, insufficient, or aberrant expression or activity of the biomarker or fragments thereof. In one embodiment, the method involves administering an agent (e.g., an agent identified by a screening assay described herein), or combination of agents that modulates (e.g., upregulates or downregulates) biomarker expression or activity. In another embodiment, the method involves administering at least one biomarker (e.g., at least one target listed in Table 1 and/or Table 2) polypeptide or nucleic acid molecule as therapy to compensate for reduced, aberrant, or unwanted biomarker expression or activity. Subjects in need of therapy can be treated according to methods described herein and additional methods, such as those also described herein, can be combined with such therapeutic methods, such as methods to diagnose, prognose, monitor, and the like (e.g., modulation of populations of monocytes and/or macrophages confirmed to have expression of the biomarker of interest, and subjects comprising such monocytes and/or macrophages).

[0533] Stimulation of biomarker activity is desirable in situations in which the biomarker is abnormally downregulated and/or in which increased biomarker activity is likely to have a beneficial effect. Likewise, inhibition of biomarker activity is desirable in situations in which biomarker is abnormally upregulated and/or in which decreased biomarker activity is likely to have a beneficial effect.

[0534] In some embodiments, the subject is an animal. The animal can be of either sex and can be at any stage of development. In some embodiments, the animals is a vertebrate, such as a mammal. In some embodiments, the subject is a non-human mammal. In some embodiments, the subject is a domesticated animal, such as a dog, cat, cow, pig, horse, sheep, or goat. In some embodiments, the subject is a companion animal, such as a dog or cat. In some embodiments, the subject is a livestock animal, such as a cow, pig, horse, sheep, or goat. In some embodiments, the subject is a zoo animal. In some embodiments, the subject is a research animal, such as a rodent (e.g., mouse or rat), dog, pig, or non-human primate. In some embodiments, the animal is a genetically engineered animal. In some embodiments, the animal is a transgenic animal (e.g., transgenic mice and transgenic pigs). In some embodiments, the subject is a fish or reptile. In some embodiments, the subject is a human. In some embodiments, the subject is an animal model of cancer. For example, the animal model can be an orthotopic xenograft animal model of a human-derived cancer.

[0535] In some embodiments of the methods encompassed by the present invention, the subject has not undergone treatment, such as chemotherapy, radiation therapy, targeted therapy, and/or immunotherapies. In some embodiments, the subject has undergone treatment, such as chemotherapy, radiation therapy, targeted therapy, and/or immunotherapies.

[0536] In some embodiments, the subject has had surgery to remove cancerous or precancerous tissue. In some embodiments, the cancerous tissue has not been removed, e.g., the cancerous tissue can be located in an inoperable region of the body, such as in a tissue that is essential for life, or in a region where a surgical procedure would cause considerable risk of harm to the patient.

[0537] In some embodiments, the subject or cells thereof are resistant to a therapy of relevance, such as resistant to immune checkpoint inhibitor therapy. For example, modulating one or more biomarkers encompassed by the present invention can overcome resistance to immune checkpoint inhibitor therapy.

[0538] In some embodiments, the subjects are in need of modulation according to compositions and methods described herein, such as having been identified as having an unwanted absence, presence, or aberrante expression and/or activity of one or more biomarkers described herein.

[0539] In some embodiments, the subjects have a solid tumor that is infiltrated with macrophages that represent at least about 5%, 6%, 7%, 8%, 9%, 10%, 11%, 12%, 13%, 14%, 15%, 16%, 17%, 18%, 19%, 20%, 21%, 22%, 23%, 24%, 25%, 26%, 27%, 28%, 29%, 30%, 31%, 32%, 33%, 34%, 35%, 36%, 37%, 38%, 39%, 40%, 41%, 42%, 43%, 44%, 45%, 46%, 47%, 48%, 49%, 50%, 51%, 52%, 53%, 54%, 55%, 56%, 57%, 58%, 59%, 60%, or more, or any range in between, inclusive, such as at least about 5% to at least about 20%, of the mass, volume, and/or number of cells in the tumor or the tumor microenvironment. Such cells can be any described as being useful in other embodiments herein, such as Type 1 macrophages, M1 macrophages, TAMs, monocytes and/or macrophages expressing CD11b or CD14 or both CD11 and CD14, and the like.

[0540] The methods encompassed by the present invention can be used to determine the responsiveness to cancer therapy (e.g., at least one modulator of biomarkers listed in Table 1 and/or Table 2) of many different cancers in subjects such as those described herein.

[0541] In addition, these modulatory agents can also be administered in combination therapy to further modulate a desired activity. For examples, agents and compositions that target to IL-4, IL-4Rα, IL-13, and CD40 can be used to modulate monocyte and/or macrophage differentiation and/or polarization. Agents and compositions that target to CD11b, CSF-1R, CCL2, neurophilim-1 and ANG-2 can be used to modulate macrophage recruitment to a tissue. Agents and compositions that target to IL-6, IL-6R and TNF-α can be used to modulate macrophage function. Additional agents include, without limitations, chemotherapeutic agents, hormones, antiangiogens, radiolabelled, compounds, or with surgery, cryotherapy, and/or radiotherapy. The preceding treatment methods can be administered in conjunction with other forms of conventional therapy (e.g., standard-of-care treatments for cancer well-known to the skilled artisan), either consecutively with, pre- or post-conventional therapy. For example, these modulatory agents can be administered with a therapeutically effective dose of chemotherapeutic agent. In another embodiment, these modulatory agents are administered in conjunction with chemotherapy to enhance the activity and efficacy of the chemotherapeutic agent. The Physicians' Desk Reference (PDR) discloses dosages of chemotherapeutic agents that have been used in the treatment of various cancers. The dosing regimen and dosages of these aforementioned chemotherapeutic drugs that are therapeutically effective will depend on the particular melanoma, being treated, the extent of the disease and other factors familiar to the physician of skill in the art and can be determined by the physician.

[0542] b. Cancer Therapies

[0543] In some embodiments, agents encompassed by the present invention are used to treat cancer. For example, the present invention provides methods for reducing pro-tumoral functions of monocytes and/or macrophages (i.e., tumorigenicity) and/or increasing anti-tumoral functions of monocytes and/or macrophages. In some particular embodiments, the method encompassed by the present invention can reduce at least one of the pro-tumoral functions of macrophages including 1) recruitment and polarization of tumor associate macrophages (TAMs), 2) tumor angiogenesis, 3) tumor growth, 4) tumor cell differentiation, 5) tumor cell survival, 6) tumor invasion and metastasis, 7) immune inhibition, and 8) immunosuppressive tumor microenvironment.

[0544] Cancer therapy (e.g., at least one modulator of one or more targets listed in Table 1 and/or Table 2) or combinations of therapies (e.g., at least one modulator of one or more targets listed in Table 1 and/or Table 2, in combination with at least one immunotherapy) can be used to contact cancer cells and/or administered to a desired subject, such as a subject that is indicated as being a likely responder to cancer therapy (e.g., at least one modulator of one or more targets listed in Table 1 and/or Table 2). In another embodiment, such cancer therapy (e.g., at least one modulator of one or more targets listed in Table 1 and/or Table 2) can be avoided once a subject is indicated as not being a likely responder to the cancer therapy (e.g., at least one modulator of one or more targets listed in Table 1 and/or Table 2) and an alternative treatment regimen, such as targeted and/or untargeted cancer therapies can be administered. Combination therapies are also contemplated and can comprise, for example, one or more chemotherapeutic agents and radiation, one or more chemotherapeutic agents and immunotherapy, or one or more chemotherapeutic agents, radiation and chemotherapy, each combination of which can be with or without cancer therapy (e.g., at least one modulator of one or more targets listed in Table 1 and/or Table 2).

[0545] Representative exemplary agents useful for modulating biomarkers encompassed by the present invention (e.g., one or more targets listed in Table 1 and/or Table 2), are described above. As described further below, anti-cancer agents encompass biotherapeutic anti-cancer agents (e.g., interferons, cytokines (e.g., tumor necrosis factor, interferon α, interferon γ, etc.), vaccines, hematopoietic growth factors, monoclonal serotherapy, immunostimulants and/or immunodulatory agents (e.g., IL-1, 2, 4, 6, and/or 12), immune cell growth factors (e.g., GM-CSF), and antibodies (e.g., trastuzumab, T-DM1, bevacizumab, cetuximab, panitumumab, rituximab, tositumomab, and the like), as well as chemotherapeutic agents.

[0546] The term “targeted therapy” refers to administration of agents that selectively interact with a chosen biomolecule to thereby treat cancer. For example, targeted therapy regarding the inhibition of immune checkpoint inhibitor is useful in combination with the methods encompassed by the present invention.

[0547] The term “immunotherapy” or “immunotherapies” generally refers to any strategy for modulating an immune response in a beneficial manner and encompasses the treatment of a subject afflicted with, or at risk of contracting or suffering a recurrence of, a disease by a method comprising inducing, enhancing, suppressing or otherwise modifying an immune response, as well as any treatment that uses certain parts of a subject's immune system to fight diseases, such as cancer. The subject's own immune system is stimulated (or suppressed), with or without administration of one or more agent for that purpose. Immunotherapies that are designed to elicit or amplify an immune response are referred to as “activation immunotherapies.” Immunotherapies that are designed to reduce or suppress an immune response are referred to as “suppression immunotherapies.” In some embodiments, an immunotherapy is specific for cells of interest, such as cancer cells. In some embodiments, immunotherapy can be “untargeted,” which refers to administration of agents that do not selectively interact with immune system cells, yet modulates immune system function. Representative examples of untargeted therapies include, without limitation, chemotherapy, gene therapy, and radiation therapy.

[0548] Some forms of immunotherapy are targeted therapies that can comprise, for example, the use of cancer vaccines and/or sensitized antigen presenting cells. For example, an oncolytic virus is a virus that is able to infect and lyse cancer cells, while leaving normal cells unharmed, making them potentially useful in cancer therapy. Replication of oncolytic viruses both facilitates tumor cell destruction and also produces dose amplification at the tumor site. They can also act as vectors for anticancer genes, allowing them to be specifically delivered to the tumor site. The immunotherapy can involve passive immunity for short-term protection of a host, achieved by the administration of pre-formed antibody directed against a cancer antigen or disease antigen (e.g., administration of a monoclonal antibody, optionally linked to a chemotherapeutic agent or toxin, to a tumor antigen). For example, anti-VEGF and mTOR inhibitors are known to be effective in treating renal cell carcinoma. Immunotherapy can also focus on using the cytotoxic lymphocyte-recognized epitopes of cancer cell lines. Alternatively, antisense polynucleotides, ribozymes, RNA interference molecules, triple helix polynucleotides and the like, can be used to selectively modulate biomolecules that are linked to the initiation, progression, and/or pathology of a tumor or cancer. Similarly, immunotherapy can take the form of cell-based therapies. For example, adoptive cellular immunotherapy is a type of immunotherapy using immune cells, such as T cells, that have a natural or genetically engineered reactivity to a patient's cancer are generated and then transferred back into the cancer patient. The injection of a large number of activated tumor-specific T cells can induce complete and durable regression of cancers.

[0549] Immunotherapy can involve passive immunity for short-term protection of a host, achieved by the administration of pre-formed antibody directed against a cancer antigen or disease antigen (e.g., administration of a monoclonal antibody, optionally linked to a chemotherapeutic agent or toxin, to a tumor antigen). Immunotherapy can also focus on using the cytotoxic lymphocyte-recognized epitopes of cancer cell lines. Alternatively, antisense polynucleotides, ribozymes, RNA interference molecules, triple helix polynucleotides and the like, can be used to selectively modulate biomolecules that are linked to the initiation, progression, and/or pathology of a tumor or cancer.

[0550] In some embodiments, an immunotherapeutic agent is an agonist of an immune-stimulatory molecule; an antagonist of an immune-inhibitory molecule; an antagonist of a chemokine; an agonist of a cytokine that stimulates T cell activation; an agent that antagonizes or inhibits a cytokine that inhibits T cell activation; and/or an agent that binds to a membrane bound protein of the B7 family. In some embodiments, the immunotherapeutic agent is an antagonist of an immune-inhibitory molecule. In some embodiments, the immunotherapeutic agents can be agents for cytokines, chemokines and growth factors, for examples, neutralizing antibodies that neutralize the inhibitory effect of tumor associated cytokines, chemokines, growth factors and other soluble factors including IL-10, TGF-β and VEGF.

[0551] In some embodiments, immunotherapy comprises inhibitors of one or more immune checkpoints. The term “immune checkpoint” refers to a group of molecules on the cell surface of CD4+ and/or CD8+ T cells that fine-tune immune responses by modulating anti-cancer immune responses, such as down-modulating or inhibiting an anti-tumor immune response. Immune checkpoint proteins are well-known in the art and include, without limitation, CTLA-4, PD-1, VISTA, B7-H2, B7-H3, PD-L1, B7-H4, B7-H6, ICOS, HVEM, PD-L2, CD200R, CD160, gp49B, PIR-B, KRLG-1, KIR family receptors, TIM-1, TIM-3, TIM-4, LAG-3 (CD223), IDO, GITR, 4-IBB, OX-40, BTLA, SIRPalpha (CD47), CD48, 2B4 (CD244), B7.1, B7.2, ILT-2, ILT-4, TIGIT, HHLA2, butyrophilins, and A2aR (see, for example, WO 2012/177624).

[0552] Some immune checkpoints are “immune-inhibitory immune checkpoints” encompassing molecules (e.g., proteins) that inhibit, down-regulate, or suppress a function of the immune system (e.g., an immune response). For example, PD-L1 (programmed death-ligand 1), also known as CD274 or B7-H1, is a protein that transmits an inhibitory signal that reduces proliferation of T cells to suppress the immune system. CTLA-4 (cytotoxic T-lymphocyte-associated protein 4), also known as CD152, is a protein receptor on the surface of antigen-presenting cells that serves as an immune checkpoint (“off” switch) to downregulate immune responses. TIM-3 (T-cell immunoglobulin and mucin-domain containing-3), also known as HAVCR2, is a cell surface protein that serves as an immune checkpoint to regulate macrophage activation. VISTA (V-domain Ig suppressor of T cell activation) is a type I transmembrane protein that functions as an immune checkpoint to inhibit T cell effector function and maintain peripheral tolerance. LAG-3 (lymphocyte-activation gene 3) is an immune checkpoint receptor that negatively regulates proliferation, activation, and homeostasis of T cells. BTLA (B- and T-lymphocyte attenuator) is a protein that displays T cell inhibition via interactions with tumor necrosis family receptors (TNF-R). KIR (killer-cell immunoglobulin-like receptor) is a family of proteins expressed on NK cells, and a minority of T cells, that suppress the cytotoxic activity of NK cells. In some embodiments, immunotherapeutic agents can be agents specific to immunosuppressive enzymes such as inhibitors that can block the activities of arginase (ARG) and indoleamine 2,3-dioxygenase (IDO), an immune checkpoint protein that suppresses T cells and NK cells, which change the catabolism of the amino acids arginine and tryptophan in the immunosuppressive tumor microenvironment. The inhibitors can include, but are not limited to, N-hydroxy-L-Arg (NOHA) targeting to ARG-expressing M2 macrophages, nitroaspirin or sildenafil (Viagra®), which blocks ARG and nitric oxide synthase (NOS) simultaneously; and IDO inhibitors, such as 1-methyl-tryptophan. The term further encompasses biologically active protein fragment, as well as nucleic acids encoding full-length immune checkpoint proteins and biologically active protein fragments thereof. In some embodiment, the term further encompasses any fragment according to homology descriptions provided herein.

[0553] By contrast, other immune checkpoints are “immune-stimulatory” encompassing molecules (e.g., proteins) that activate, stimulate, or promote a function of the immune system (e.g., an immune response). In some embodiments, the immune-stimulatory molecule is CD28, CD80 (B7.1), CD86 (B7.2), 4-1BB (CD137), 4-1BBL (CD137L), CD27, CD70, CD40, CD40L, CD122, CD226, CD30, CD30L, OX40, OX40L, HVEM, BTLA, GITR and its ligand GITRL, LIGHT, LTpR, LTas, ICOS (CD278), ICOSL (B7-H2), and NKG2D. CD40 (cluster of differentiation 40) is a costimulatory protein found on antigen presenting cells that is required for their activation. OX40, also known as tumor necrosis factor receptor superfamily member 4 (TNFRSF4) or CD134, is involved in maintenance of an immune response after activation by preventing T-cell death and subsequently increasing cytokine production. CD137 is a mgember of the tumor necrosis factor receptor (TNF-R) family that co-stimulates activated T cells to enhance proliferation and T cell survival. CD122 is a subunit of the interleukin-2 receptor (IL-2) protein, which promotes differentiation of immature T cells into regulatory, effector, or memory T cells. CD27 is a member of the tumor necrosis factor receptor superfamily and serves as a co-stimulatory immune checkpoint molecule. CD28 (cluster of differentiation 28) is a protein expressed on T cells that provides co-stimulatory signals required for T cell activation and survival. GITR (glucocorticoid-induced TNFR-related protein), also known as TNFRSF18 and AITR, is a protein that plays a key role in dominant immunological self-tolerance maintained by regulatory T cells. ICOS (inducible T-cell co-stimulator), also known as CD278, is a CD28-superfamily costimulatory molecule that is expressed on activated T cells and play a role in T cell signaling and immune responses.

[0554] Immune checkpoints and their sequences are well-known in the art and representative embodiments are described further below. Immune checkpoints generally relate to pairs of inhibitory receptors and the natural binding partners (e.g., ligands). For example, PD-1 polypeptides are inhibitory receptors capable of transmitting an inhibitory signal to an immune cell to thereby inhibit immune cell effector function, or are capable of promoting costimulation (e.g, by competitive inhibition) of immune cells, e.g., when present in soluble, monomeric form. Preferred PD-1 family members share sequence identity with PD-1 and bind to one or more B7 family members, e.g., B7-1, B7-2, PD-1 ligand, and/or other polypeptides on antigen presenting cells. The term “PD-1 activity,” includes the ability of a PD-1 polypeptide to modulate an inhibitory signal in an activated immune cell, e.g., by engaging a natural PD-1 ligand on an antigen presenting cell. Modulation of an inhibitory signal in an immune cell results in modulation of proliferation of, and/or cytokine secretion by, an immune cell. Thus, the term “PD-1 activity” includes the ability of a PD-1 polypeptide to bind its natural ligand(s), the ability to modulate immune cell inhibitory signals, and the ability to modulate the immune response. The term “PD-1 ligand” refers to binding partners of the PD-1 receptor and includes both PD-L1 (Freeman et al. (2000). J. Exp. Med. 192:1027-1034) and PD-L2 (Latchman et al. (2001) Nat. Immunol. 2:261). The term “PD-1 ligand activity” includes the ability of a PD-1 ligand polypeptide to bind its natural receptor(s) (e.g., PD-1 or B7-1), the ability to modulate immune cell inhibitory signals, and the ability to modulate the immune response.

[0555] As used herein, the term “immune checkpoint therapy” refers to the use of agents that inhibit immune-inhibitory immune checkpoints, such as inhibiting their nucleic acids and/or proteins. Inhibition of one or more such immune checkpoints can block or otherwise neutralize inhibitory signaling to thereby upregulate an immune response in order to more efficaciously treat cancer. Exemplary agents useful for inhibiting immune checkpoints include antibodies, small molecules, peptides, peptidomimetics, natural ligands, and derivatives of natural ligands, that can either bind and/or inactivate or inhibit immune checkpoint proteins, or fragments thereof; as well as RNA interference, antisense, nucleic acid aptamers, etc. that can downregulate the expression and/or activity of immune checkpoint nucleic acids, or fragments thereof. Exemplary agents for upregulating an immune response include antibodies against one or more immune checkpoint proteins that block the interaction between the proteins and its natural receptor(s); a non-activating form of one or more immune checkpoint proteins (e.g., a dominant negative polypeptide); small molecules or peptides that block the interaction between one or more immune checkpoint proteins and its natural receptor(s); fusion proteins (e.g., the extracellular portion of an immune checkpoint inhibition protein fused to the Fc portion of an antibody or immunoglobulin) that bind to its natural receptor(s); nucleic acid molecules that block immune checkpoint nucleic acid transcription or translation; and the like. Such agents can directly block the interaction between the one or more immune checkpoints and its natural receptor(s) (e.g., antibodies) to prevent inhibitory signaling and upregulate an immune response. Alternatively, agents can indirectly block the interaction between one or more immune checkpoint proteins and its natural receptor(s) to prevent inhibitory signaling and upregulate an immune response. For example, a soluble version of an immune checkpoint protein ligand such as a stabilized extracellular domain can binding to its receptor to indirectly reduce the effective concentration of the receptor to bind to an appropriate ligand. In one embodiment, anti-PD-1 antibodies, anti-PD-L1 antibodies, and/or anti-PD-L2 antibodies, either alone or in combination, are used to inhibit immune checkpoints. Therapeutic agents used for blocking the PD-1 pathway include antagonistic antibodies and soluble PD-L1 ligands. The antagonist agents against PD-1 and PD-L1/2 inhibitory pathway can include, but are not limited to, antagonistic antibodies to PD-1 or PD-L1/2 (e.g., 17D8, 2D3, 4H1, 5C4 (also known as nivolumab or BMS-936558), 4A11, 7D3 and 5F4 disclosed in U.S. Pat. No. 8,008,449; AMP-224, pidilizumab (CT-011), pembrolizumab, and antibodies disclosed in U.S. Pat. Nos. 8,779,105; 8,552,154; 8,217,149; 8,168,757; 8,008,449; 7,488,802; 7,943,743; 7,635,757; and 6,808,710. Similarly, additional representative checkpoint inhibitors can be, but are not limited to, antibodies against inhibitory regulator CTLA-4 (anti-cytotoxic T-lymphocyte antigen 4 anti-cytotoxic T-lymphocyte antigen 4), such as ipilimumab, tremelimumab (fully humanized), anti-CD28 antibodies, anti-CTLA-4 adnectins, anti-CTLA-4 domain antibodies, single chain anti-CTLA-4 antibody fragments, heavy chain anti-CTLA-4 fragments, light chain anti-CTLA-4 fragments, and other antibodies, such as those disclosed in U.S. Pat. Nos. 8,748,815; 8,529,902; 8,318,916; 8,017,114; 7,744,875; 7,605,238; 7,465,446, 7,109,003; 7,132,281; 6,984,720; 6,682,736; 6,207,156; and 5,977,318, as well as EP Pat. No. 1212422, U.S. Pat Publ. Numbers 2002/0039581 and 2002/086014, and Hurwitz et al. (1998) Proc. Natl. Acad. Sci. U.S.A. 95:10067-10071.

[0556] The representative definitions of immune checkpoint activity, ligand, blockade, and the like exemplified for PD-1, PD-L1, PD-L2, and CTLA-4 apply generally to other immune checkpoints.

[0557] The term “untargeted therapy” refers to administration of agents that do not selectively interact with a chosen biomolecule yet treat cancer. Representative examples of untargeted therapies include, without limitation, chemotherapy, gene therapy, and radiation therapy.

[0558] In one embodiment, chemotherapy is used. Chemotherapy includes the administration of a chemotherapeutic agent. Such a chemotherapeutic agent can be, but is not limited to, those selected from among the following groups of compounds: platinum compounds, cytotoxic antibiotics, antimetabolities, anti-mitotic agents, alkylating agents, arsenic compounds, DNA topoisomerase inhibitors, taxanes, nucleoside analogues, plant alkaloids, and toxins; and synthetic derivatives thereof. Exemplary agents include, but are not limited to, alkylating agents: nitrogen mustards (e.g., cyclophosphamide, ifosfamide, trofosfamide, chlorambucil, estramustine, and melphalan), nitrosoureas (e.g., carmustine (BCNU) and lomustine (CCNU)), alkylsulphonates (e.g., busulfan and treosulfan), triazenes (e.g., dacarbazine, temozolomide), cisplatin, treosulfan, and trofosfamide; plant alkaloids: vinblastine, paclitaxel, docetaxol; DNA topoisomerase inhibitors: teniposide, crisnatol, and mitomycin; anti-folates: methotrexate, mycophenolic acid, and hydroxyurea; pyrimidine analogs: 5-fluorouracil, doxifluridine, and cytosine arabinoside; purine analogs: mercaptopurine and thioguanine; DNA antimetabolites: 2′-deoxy-5-fluorouridine, aphidicolin glycinate, and pyrazoloimidazole; and antimitotic agents: halichondrin, colchicine, and rhizoxin. Similarly, additional exemplary agents including platinum-ontaining compounds (e.g., cisplatin, carboplatin, oxaliplatin), vinca alkaloids (e.g., vincristine, vinblastine, vindesine, and vinorelbine), taxoids (e.g., paclitaxel or a paclitaxel equivalent such as nanoparticle albumin-bound paclitaxel (ABRAXANE), docosahexaenoic acid bound-paclitaxel (DHA-paclitaxel, Taxoprexin), polyglutamate bound-paclitaxel (PG-paclitaxel, paclitaxel poliglumex, CT-2103, XYOTAX), the tumor-activated prodrug (TAP) ANG1005 (Angiopep-2 bound to three molecules of paclitaxel), paclitaxel-EC-1 (paclitaxel bound to the erbB2-recognizing peptide EC-1), and glucose-conjugated paclitaxel, e.g., 2′-paclitaxel methyl 2-glucopyranosyl succinate; docetaxel, taxol), epipodophyllins (e.g., etoposide, etoposide phosphate, teniposide, topotecan, 9-aminocamptothecin, camptoirinotecan, irinotecan, crisnatol, mytomycin C), anti-metabolites, DHFR inhibitors (e.g., methotrexate, dichloromethotrexate, trimetrexate, edatrexate), IMP dehydrogenase inhibitors (e.g., mycophenolic acid, tiazofurin, ribavirin, and EICAR), ribonuclotide reductase inhibitors (e.g., hydroxyurea and deferoxamine), uracil analogs (e.g., 5-fluorouracil (5-FU), floxuridine, doxifluridine, ratitrexed, tegafur-uracil, capecitabine), cytosine analogs (e.g., cytarabine (ara C), cytosine arabinoside, and fludarabine), purine analogs (e.g., mercaptopurine and Thioguanine), Vitamin D3 analogs (e.g., EB 1089, CB 1093, and KH 1060), isoprenylation inhibitors (e.g., lovastatin), dopaminergic neurotoxins (e.g., 1-methyl-4-phenylpyridinium ion), cell cycle inhibitors (e.g., staurosporine), actinomycin (e.g., actinomycin D, dactinomycin), bleomycin (e.g., bleomycin A2, bleomycin B2, peplomycin), anthracycline (e.g., daunorubicin, doxorubicin, pegylated liposomal doxorubicin, idarubicin, epirubicin, pirarubicin, zorubicin, mitoxantrone), MDR inhibitors (e.g., verapamil), Ca²⁺ ATPase inhibitors (e.g., thapsigargin), imatinib, thalidomide, lenalidomide, tyrosine kinase inhibitors (e.g., axitinib (AGO13736), bosutinib (SKI-606), cediranib (RECENTIN®, AZD2171), dasatinib (SPRYCEL®, BMS-354825), erlotinib (TARCEVA®), gefitinib (IRESSA®), imatinib (Gleevec®, CGP57148B, STI-571), lapatinib (TYKERB®, TYVERB®), lestaurtinib (CEP-701), neratinib (HKI-272), nilotinib (TASIGNA®), semaxanib (semaxinib, SU5416), sunitinib (SUTENT®, SU11248), toceranib (PALLADIA®), vandetanib (ZACTIMA®, ZD6474), vatalanib (PTK787, PTK/ZK), trastuzumab (HERCEPTIN®), bevacizumab (AVASTIN®), rituximab (RITUXAN®), cetuximab (ERBITUX®), panitumumab (VECTIBIX®), ranibizumab (Lucentis), nilotinib (TASIGNA®), sorafenib (NEXAVAR®), everolimus (AFINITOR®), alemtuzumab (CAMPATH®), gemtuzumab ozogamicin (MYLOTARG®), temsirolimus (TORISEL®), ENMD-2076, PCI-32765, AC220, dovitinib lactate (TK1258, CHIR-258), BIBW 2992 (TOVOK™), SGX523, PF-04217903, PF-02341066, PF-299804, BMS-777607, ABT-869, MP470, BIBF 1120 (VARGATEF®), AP24534, JNJ-26483327, MGCD265, DCC1-2036, BMS-690154, CEP-11981, tivozanib (AV-951), OSI-930, MM-121, XL-184, XL-647, and/or XL228), proteasome inhibitors (e.g., bortezomib (VELCADE)), mTOR inhibitors (e.g., rapamycin, temsirolimus (CCI-779), everolimus (RAD-001), ridaforolimus, AP23573 (Ariad), AZD8055 (AstraZeneca), BEZ235 (Novartis), BGT226 (Norvartis), XL765 (Sanofi Aventis), PF-4691502 (Pfizer), GDC0980 (Genentech), SF1126 (Semafoe) and OSI-027 (OSI)), oblimersen, gemcitabine, carminomycin, leucovorin, pemetrexed, cyclophosphamide, dacarbazine, procarbizine, prednisolone, dexamethasone, campathecin, plicamycin, asparaginase, aminopterin, methopterin, porfiromycin, melphalan, leurosidine, leurosine, chlorambucil, trabectedin, procarbazine, discodermolide, carminomycin, aminopterin, and hexamethyl melamine. Compositions comprising one or more chemotherapeutic agents (e.g., FLAG, CHOP) can also be used. FLAG comprises fludarabine, cytosine arabinoside (Ara-C) and G-CSF. CHOP comprises cyclophosphamide, vincristine, doxorubicin, and prednisone. In another embodiment, PARP (e.g., PARP-1 and/or PARP-2) inhibitors are used and such inhibitors are well-known in the art (e.g., Olaparib, ABT-888, BSI-201, BGP-15 (N-Gene Research Laboratories, Inc.); INO-1001 (Inotek Pharmaceuticals Inc.): PJ34 (Soriano et al., 2001; Pacher et al., 2002b); 3-aminobenzamide (Trevigen); 4-amino-1,8-naphthalimide; (Trevigen); 6(5H)-phenanthridinone (Trevigen); benzamide (U.S. Pat. Re. 36,397); and NU1025 (Bowman et al.). The mechanism of action is generally related to the ability of PARP inhibitors to bind PARP and decrease its activity. PARP catalyzes the conversion of beta-nicotinamide adenine dinucleotide (NAD+) into nicotinamide and poly-ADP-ribose (PAR). Both poly (ADP-ribose) and PARP have been linked to regulation of transcription, cell proliferation, genomic stability, and carcinogenesis (Bouchard et. al. (2003) Exp. Hematol. 31:446-454); Herceg (2001) Mut. Res. 477:97-110). Poly(ADP-ribose) polymerase 1 (PARP1) is a key molecule in the repair of DNA single-strand breaks (SSBs) (de Murcia J. et al. (1997) Proc. Natl. Acad Sci. U.S.A. 94:7303-7307; Schreiber et al. (2006) Nat. Rev. Mol. Cell Biol. 7:517-528; Wang et al. (1997) Genes Dev. 11:2347-2358). Knockout of SSB repair by inhibition of PARP1 function induces DNA double-strand breaks (DSBs) that can trigger synthetic lethality in cancer cells with defective homology-directed DSB repair (Bryant et al. (2005) Nature 434:913-917; Farmer et al. (2005) Nature 434:917-921). The foregoing examples of chemotherapeutic agents are illustrative and are not intended to be limiting.

[0559] In another embodiment, radiation therapy is used. The radiation used in radiation therapy can be ionizing radiation. Radiation therapy can also be gamma rays, X-rays, or proton beams. Examples of radiation therapy include, but are not limited to, external-beam radiation therapy, interstitial implantation of radioisotopes (I-125, palladium, iridium), radioisotopes such as strontium-89, thoracic radiation therapy, intraperitoneal P-32 radiation therapy, and/or total abdominal and pelvic radiation therapy. For a general overview of radiation therapy, see Hellman, Chapter 16: Principles of Cancer Management: Radiation Therapy, 6th edition, 2001, DeVita et al., eds., J. B. Lippencott Company, Philadelphia. The radiation therapy can be administered as external beam radiation or teletherapy wherein the radiation is directed from a remote source. The radiation treatment can also be administered as internal therapy or brachytherapy wherein a radioactive source is placed inside the body close to cancer cells or a tumor mass. Also encompassed is the use of photodynamic therapy comprising the administration of photosensitizers, such as hematoporphyrin and its derivatives, Vertoporfin (BPD-MA), phthalocyanine, photosensitizer Pc4, demethoxy-hypocrellin A; and 2BA-2-DMHA.

[0560] In another embodiment, hormone therapy is used. Hormonal therapeutic treatments can comprise, for example, hormonal agonists, hormonal antagonists (e.g., flutamide, bicalutamide, tamoxifen, raloxifene, leuprolide acetate (LUPRON), LH-RH antagonists), inhibitors of hormone biosynthesis and processing, and steroids (e.g., dexamethasone, retinoids, deltoids, betamethasone, cortisol, cortisone, prednisone, dehydrotestosterone, glucocorticoids, mineralocorticoids, estrogen, testosterone, progestins), vitamin A derivatives (e.g., all-trans retinoic acid (ATRA)); vitamin D3 analogs; antigestagens (e.g., mifepristone, onapristone), or antiandrogens (e.g., cyproterone acetate).

[0561] In another embodiment, hyperthermia, a procedure in which body tissue is exposed to high temperatures (up to 106° F.) is used. Heat can help shrink tumors by damaging cells or depriving them of substances they need to live. Hyperthermia therapy can be local, regional, and whole-body hyperthermia, using external and internal heating devices. Hyperthermia is almost always used with other forms of therapy (e.g., radiation therapy, chemotherapy, and biological therapy) to try to increase their effectiveness. Local hyperthermia refers to heat that is applied to a very small area, such as a tumor. The area can be heated externally with high-frequency waves aimed at a tumor from a device outside the body. To achieve internal heating, one of several types of sterile probes can be used, including thin, heated wires or hollow tubes filled with warm water; implanted microwave antennae; and radiofrequency electrodes. In regional hyperthermia, an organ or a limb is heated. Magnets and devices that produce high energy are placed over the region to be heated. In another approach, called perfusion, some of the patient's blood is removed, heated, and then pumped (perfused) into the region that is to be heated internally. Whole-body heating is used to treat metastatic cancer that has spread throughout the body. It can be accomplished using warm-water blankets, hot wax, inductive coils (like those in electric blankets), or thermal chambers (similar to large incubators). Hyperthermia does not cause any marked increase in radiation side effects or complications. Heat applied directly to the skin, however, can cause discomfort or even significant local pain in about half the patients treated. It can also cause blisters, which generally heal rapidly.

[0562] In still another embodiment, photodynamic therapy (also called PDT, photoradiation therapy, phototherapy, or photochemotherapy) is used for the treatment of some types of cancer. It is based on the discovery that certain chemicals known as photosensitizing agents can kill one-celled organisms when the organisms are exposed to a particular type of light. PDT destroys cancer cells through the use of a fixed-frequency laser light in combination with a photosensitizing agent. In PDT, the photosensitizing agent is injected into the bloodstream and absorbed by cells all over the body. The agent remains in cancer cells for a longer time than it does in normal cells. When the treated cancer cells are exposed to laser light, the photosensitizing agent absorbs the light and produces an active form of oxygen that destroys the treated cancer cells. Light exposure must be timed carefully so that it occurs when most of the photosensitizing agent has left healthy cells but is still present in the cancer cells. The laser light used in PDT can be directed through a fiber-optic (a very thin glass strand). The fiber-optic is placed close to the cancer to deliver the proper amount of light. The fiber-optic can be directed through a bronchoscope into the lungs for the treatment of lung cancer or through an endoscope into the esophagus for the treatment of esophageal cancer. An advantage of PDT is that it causes minimal damage to healthy tissue. However, because the laser light currently in use cannot pass through more than about 3 centimeters of tissue (a little more than one and an eighth inch), PDT is mainly used to treat tumors on or just under the skin or on the lining of internal organs. Photodynamic therapy makes the skin and eyes sensitive to light for 6 weeks or more after treatment. Patients are advised to avoid direct sunlight and bright indoor light for at least 6 weeks. If patients must go outdoors, they need to wear protective clothing, including sunglasses. Other temporary side effects of PDT are related to the treatment of specific areas and can include coughing, trouble swallowing, abdominal pain, and painful breathing or shortness of breath. In December 1995, the U.S. Food and Drug Administration (FDA) approved a photosensitizing agent called porfimer sodium, or Photofrin®, to relieve symptoms of esophageal cancer that is causing an obstruction and for esophageal cancer that cannot be satisfactorily treated with lasers alone. In January 1998, the FDA approved porfimer sodium for the treatment of early nonsmall cell lung cancer in patients for whom the usual treatments for lung cancer are not appropriate. The National Cancer Institute and other institutions are supporting clinical trials (research studies) to evaluate the use of photodynamic therapy for several types of cancer, including cancers of the bladder, brain, larynx, and oral cavity.

[0563] In yet another embodiment, laser therapy is used to harness high-intensity light to destroy cancer cells. This technique is often used to relieve symptoms of cancer such as bleeding or obstruction, especially when the cancer cannot be cured by other treatments. It can also be used to treat cancer by shrinking or destroying tumors. The term “laser” stands for light amplification by stimulated emission of radiation. Ordinary light, such as that from a light bulb, has many wavelengths and spreads in all directions. Laser light, on the other hand, has a specific wavelength and is focused in a narrow beam. This type of high-intensity light contains a lot of energy. Lasers are very powerful and can be used to cut through steel or to shape diamonds. Lasers also can be used for very precise surgical work, such as repairing a damaged retina in the eye or cutting through tissue (in place of a scalpel). Although there are several different kinds of lasers, only three kinds have gained wide use in medicine: Carbon dioxide (CO₂) laser—This type of laser can remove thin layers from the skin's surface without penetrating the deeper layers. This technique is particularly useful in treating tumors that have not spread deep into the skin and certain precancerous conditions. As an alternative to traditional scalpel surgery, the CO₂ laser is also able to cut the skin. The laser is used in this way to remove skin cancers. Neodymium:yttrium-aluminum-garnet (Nd:YAG) laser—Light from this laser can penetrate deeper into tissue than light from the other types of lasers, and it can cause blood to clot quickly. It can be carried through optical fibers to less accessible parts of the body. This type of laser is sometimes used to treat throat cancers. Argon laser—This laser can pass through only superficial layers of tissue and is therefore useful in dermatology and in eye surgery. It also is used with light-sensitive dyes to treat tumors in a procedure known as photodynamic therapy (PDT). Lasers have several advantages over standard surgical tools, including: Lasers are more precise than scalpels. Tissue near an incision is protected, since there is little contact with surrounding skin or other tissue. The heat produced by lasers sterilizes the surgery site, thus reducing the risk of infection. Less operating time can be needed because the precision of the laser allows for a smaller incision. Healing time is often shortened; since laser heat seals blood vessels, there is less bleeding, swelling, or scarring. Laser surgery can be less complicated. For example, with fiber optics, laser light can be directed to parts of the body without making a large incision. More procedures can be done on an outpatient basis. Lasers can be used in two ways to treat cancer: by shrinking or destroying a tumor with heat, or by activating a chemical—known as a photosensitizing agent—that destroys cancer cells. In PDT, a photosensitizing agent is retained in cancer cells and can be stimulated by light to cause a reaction that kills cancer cells. CO₂ and Nd:YAG lasers are used to shrink or destroy tumors. They can be used with endoscopes, tubes that allow physicians to see into certain areas of the body, such as the bladder. The light from some lasers can be transmitted through a flexible endoscope fitted with fiber optics. This allows physicians to see and work in parts of the body that could not otherwise be reached except by surgery and therefore allows very precise aiming of the laser beam. Lasers also can be used with low-power microscopes, giving the doctor a clear view of the site being treated. Used with other instruments, laser systems can produce a cutting area as small as 200 microns in diameter-less than the width of a very fine thread. Lasers are used to treat many types of cancer. Laser surgery is a standard treatment for certain stages of glottis (vocal cord), cervical, skin, lung, vaginal, vulvar, and penile cancers. In addition to its use to destroy the cancer, laser surgery is also used to help relieve symptoms caused by cancer (palliative care). For example, lasers can be used to shrink or destroy a tumor that is blocking a patient's trachea (windpipe), making it easier to breathe. It is also sometimes used for palliation in colorectal and anal cancer. Laser-induced interstitial thermotherapy (LITT) is one of the most recent developments in laser therapy. LITT uses the same idea as a cancer treatment called hyperthermia; that heat can help shrink tumors by damaging cells or depriving them of substances they need to live. In this treatment, lasers are directed to interstitial areas (areas between organs) in the body. The laser light then raises the temperature of the tumor, which damages or destroys cancer cells.

[0564] The duration and/or dose of treatment with cancer therapy (e.g., at least one modulator of biomarkers listed in Table 1 and/or Table 2) can vary according to the particular modulator of biomarkers listed in Table 1 and/or Table 2 or combination thereof. An appropriate treatment time for a particular cancer therapeutic agent will be appreciated by the skilled artisan. The invention contemplates the continued assessment of optimal treatment schedules for each cancer therapeutic agent, where the phenotype of the cancer of the subject as determined by the methods encompassed by the present invention is a factor in determining optimal treatment doses and schedules.

[0565] 2. Screening Methods

[0566] Another aspect encompassed by the present invention encompasses screening assays.

[0567] In some embodiments, methods are provided for selecting agents (e.g., antibodies, fusion proteins, peptides, or small molecules) which modulate the copy number, amount, and/or activity of one or more biomarkers encompassed by the present invention (e.g., one or more targets listed in Table 1 and/or Table 2) in monocytes and/or macrophages. In some embodiments, the selected agents also modulate immune responses mediated by such monocytes and/or macrophages (e.g., modulating CD8+ cyototoxic T cell killing; modulating sensitivity of cancer cells to immune checkpoint therapy; modulating resistance to anti-cancer therapies like immunecheckpoint therapy; modulating the modulating cancer therapy; modulating immune cell micgration, recruitment, differentiation, and/or survival, such as of NK, neutrophil, and macrophage cells; and the like). Thus, any diagnostic, prognostic, or screening method described herein can use biomarkers described herein as readouts of a desired phenotype, such as modulated immune phenotype, as well as agents that modulate the copy number, amount, and/or activity of one or more biomarkers described herein to confirm modulation of the one or more biomarkers and/or to confirm the effects of the agents on readouts of a desired phenotype, such as modulated immune responses, sensitivity to immune checkpoint blockade, and the like. Such methods can utilize screening assays, including cell-based and non-cell based assays.

[0568] For example, a method for screening for agents that sensitize cancer cells to cytotoxic T cell-mediated killing and/or immune checkpoint therapy comprising a) contacting cancer cells with cytotoxic T cells and/or immune checkpoint therapy in the presence of monocytes and/or macrophages contacted with i) at least one agent that decreases the copy number, amount, and/or activity of at least one target listed in Table 1 and/or ii) at least one agent that increases the copy number, amount, and/or activity of the at least one target listed in Table 2; b) contacting cancer cells with cytotoxic T cells and/or immune checkpoint therapy in the presence of control monocytes and/or macrophages that are not contacted with the at least one agent or agents; and c) identifying agents that sensitize cancer cells to cytotoxic T cell-mediated killing and/or immune checkpoint therapy by identifying agents that increase cytotoxic T cell-mediated killing and/or immune checkpoint therapy efficacy (such as cell killing) in a) compared to b), is provided.

[0569] In some embodiments, the assays are directed to identifying agents that inhibit immune cell proliferation and/or effector function, or to induce anergy, clonal deletion, and/or exhaustion by assaying the opposite modulation effect of the one or more biomarkers. The present invention further encompasses methods of inhibiting immune cell proliferation and/or effector function, or to induce anergy, clonal deletion, and/or exhaustion through such a modulation.

[0570] In another example, a method for screening for agents that sensitize cancer cells to cytotoxic T cell-mediated killing and/or immune checkpoint therapy comprising a) contacting cancer cells with cytotoxic T cells and/or immune checkpoint therapy in the presence of monocytes and/or macrophages engineered to decrease the copy number, amount, and/or activity of at least one target listed in Table 1 and/or ii) engineered to increase the copy number, amount, and/or activity of the at least one target listed in Table 2; b) contacting cancer cells with cytotoxic T cells and/or immune checkpoint therapy in the presence of control monocytes and/or macrophages; and c) identifying agents that sensitize cancer cells to cytotoxic T cell-mediated killing and/or immune checkpoint therapy efficacy (such as cell killing) in a) compared to b), is provided.

[0571] Generally, the present invention encompasses assays for screening agents, such as test compounds, that bind to, or modulate the activity of, one or more biomarkers encompassed by the present invention (e.g., targets listed in Table 1, Table 2, Examples, etc.). In one embodiment, a method for identifying an agent to modulate an immune response entails determining the ability of the agent to modulate, e.g. enhance or inhibit, one or more targets listed in Table 1 and/or Table 2. Such agents include, without limitation, antibodies, proteins, fusion proteins, small molecules, and nucleic acids.

[0572] In some embodiments, a method for identifying an agent which enhances an immune response entails determining the ability of the candidate agent to modulate the one or more biomarkers and further modulate an immune response of interest, such as modulated inflammatory phenotype, cytotoxic T cell activation and/or activity, sensitivity of cancer cells to immune checkpoint therapy, and the like.

[0573] In some embodiments, an assay is a cell-free or cell-based assay, comprising contacting one or more biomarkers (e.g., one or more targets listed in Table 1 and/or Table 2), with a test agent, and determining the ability of the test agent to modulate (e.g., upregulate or downregulate) the copy number, amount, and/or activity of the biomarker, such as by measuring direct or indirect parameters as described below.

[0574] In some embodiments, an assay is a cell-based assay, such as one comprising contacting (a) a cell of interest (e.g., monocytes and/or macrophages) with a test agent and determining the ability of the test agent to modulate (e.g. upregulate or downregulate) the copy number, amount, and/or activity of the one or more biomarkers, such as binding between the one or more biomarkers and one or more natural binding partners.

[0575] Determining the ability of the polypeptides to bind to, or interact with, each other can be accomplished, e.g., by measuring direct binding or by measuring a parameter of immune cell activation.

[0576] In another embodiment, an assay is a cell-based assay, comprising contacting a cancer cell with cytotoxic T cells, monocytes and/or macgraophes, and a test agent, and determining the ability of the test agent to modulate the copy number, amount, and/or activity of at least one target listed in Table 1 and/or Table 2, and/or modulated immune responses, such as by measuring direct or indirect parameters as described below.

[0577] The methods described above and herein can also be adapted to test one or more agents that are already known to modulate the copy number, amount, and/or activity of one or more biomarkers described herein to confirm modulation of the one or more biomarkers and/or to confirm the effects of the agents on readouts of a desired phenotype, such as modulated immune responses, sensitivity to immune checkpoint blockade, and the like.

[0578] In a direct binding assay, biomarker protein (or their respective target polypeptides or molecules) can be coupled with a radioisotope or enzymatic label such that binding can be determined by detecting the labeled protein or molecule in a complex. For example, the targets can be labeled with ¹²⁵I, ³⁵S, ¹⁴C, or ¹H, either directly or indirectly, and the radioisotope detected by direct counting of radioemmission or by scintillation counting. Alternatively, the targets can be enzymatically labeled with, for example, horseradish peroxidase, alkaline phosphatase, or luciferase, and the enzymatic label detected by determination of conversion of an appropriate substrate to product. Determining the interaction between biomarker and substrate can also be accomplished using standard binding or enzymatic analysis assays. In one or more embodiments of the above described assay methods, it can be desirable to immobilize polypeptides or molecules to facilitate separation of complexed from uncomplexed forms of one or both of the proteins or molecules, as well as to accommodate automation of the assay.

[0579] Binding of a test agent to a target can be accomplished in any vessel suitable for containing the reactants. Non-limiting examples of such vessels include microtiter plates, test tubes, and micro-centrifuge tubes. Immobilized forms of the antibodies encompassed by the present invention can also include antibodies bound to a solid phase like a porous, microporous (with an average pore diameter less than about one micron) or macroporous (with an average pore diameter of more than about 10 microns) material, such as a membrane, cellulose, nitrocellulose, or glass fibers; a bead, such as that made of agarose or polyacrylamide or latex; or a surface of a dish, plate, or well, such as one made of polystyrene.

[0580] For example, in a direct binding assay, the polypeptides can be coupled with a radioisotope or enzymatic label such that polypeptide interactions and/or activity, such as binding events, can be determined by detecting the labeled protein in a complex. For example, the polypeptides can be labeled with ¹²⁵I, ³⁵S, ¹⁴C, or ³H, either directly or indirectly, and the radioisotope detected by direct counting of radioemmission or by scintillation counting. Alternatively, the polypeptides can be enzymatically labeled with, for example, horseradish peroxidase, alkaline phosphatase, or luciferase, and the enzymatic label detected by determination of conversion of an appropriate substrate to product.

[0581] It is also within the scope of the present invention to determine the ability of an agent to modulate a parameter of interest without the labeling of any of the interactants. For example, a microphysiometer can be used to detect interaction between polypeptides without the labeling of polypeptides to be monitored (McConnell et al. (1992) Science 257:1906-1912). As used herein, a “microphysiometer” (e.g., Cytosensor) is an analytical instrument that measures the rate at which a cell acidifies its environment using a light-addressable potentiometric sensor (LAPS). Changes in this acidification rate can be used as an indicator of the interaction between compound and receptor.

[0582] In some embodiments, determining the ability of the blocking agents (e.g. antibodies, fusion proteins, peptides, or small molecules) to antagonize the interaction between a given set of polypeptides can be accomplished by determining the activity of one or more members of the set of polypeptides. For example, the activity of a protein and/or one or more natural binding partners can be determined by detecting induction of a cellular second messenger (e.g., intracellular signaling), detecting catalytic/enzymatic activity of an appropriate substrate, detecting the induction of a reporter gene (comprising a target-responsive regulatory element operatively linked to a nucleic acid encoding a detectable marker, e.g., chloramphenicol acetyl transferase), or detecting a cellular response regulated by the protein and/or the one or more natural binding partners. Determining the ability of the blocking agent to bind to or interact with said polypeptide can be accomplished, for example, by measuring the ability of a compound to modulate immune cell costimulation or inhibition in a proliferation assay, or by interfering with the ability of said polypeptide to bind to antibodies that recognize a portion thereof.

[0583] Agents that modulate biomarker amount and/or activity, such as interactions with one or more natural binding partners, can be identified by their ability to inhibit immune cell proliferation, and/or effector function, or to induce anergy, clonal deletion, and/or exhaustion when added to an in vitro assay. For example, cells can be cultured in the presence of an agent that stimulates signal transduction via an activating receptor. A number of recognized readouts of cell activation can be employed to measure, cell proliferation or effector function (e.g., antibody production, cytokine production, phagocytosis) in the presence of the activating agent. The ability of a test agent to block this activation can be readily determined by measuring the ability of the agent to effect a decrease in proliferation or effector function being measured, using techniques known in the art.

[0584] For example, agents encompassed by the present invention can be tested for the ability to inhibit or enhance costimulation in a T cell assay, as described in Freeman et al. (2000) J. Exp. Afed. 192:1027 and Latchman et al. (2001) Nat. Immunol. 2:261. CD4+ T cells can be isolated from human PBMCs and stimulated with activating anti-CD3 antibody. Proliferation of T cells can be measured by ³H thymidine incorporation. An assay can be performed with or without CD28 costimulation in the assay. Similar assays can be performed with Jurkat T cells and PHA-blasts from PBMCs.

[0585] Alternatively, agents encompassed by the present invention can be tested for the ability to modulate cellular production of cytokines which are produced by or whose production is enhanced or inhibited in immune cells in response to modulation of the one or more biomarkers. Indicative cytokines released by immune cells of interest can be identified by ELISA or by the ability of an antibody which blocks the cytokine to inhibit immune cell proliferation or proliferation of other cell types that is induced by the cytokine. For example, an IL-4 ELISA kit is available from Genzyme (Cambridge Mass.), as is an IL-7 blocking antibody. Blocking antibodies against IL-9 and IL-12 are available from Genetics Institute (Cambridge, Mass.). An in vitro immune cell costimulation assay can also be used in a method for identifying cytokines which can be modulated by modulation of the one or more biomarkers. For example, if a particular activity induced upon costimulation, e.g., immune cell proliferation, cannot be inhibited by addition of blocking antibodies to known cytokines, the activity can result from the action of an unknown cytokine. Following costimulation, this cytokine can be purified from the media by conventional methods and its activity measured by its ability to induce immune cell proliferation. To identify cytokines which can play a role the induction of tolerance, an in vitro T cell costimulation assay as described above can be used. In this case, T cells would be given the primary activation signal and contacted with a selected cytokine, but would not be given the costimulatory signal. After washing and resting the immune cells, the cells would be rechallenged with both a primary activation signal and a costimulatory signal. If the immune cells do not respond (e.g., proliferate or produce cytokines) they have become tolerized and the cytokine has not prevented the induction of tolerance. However, if the immune cells respond, induction of tolerance has been prevented by the cytokine. Those cytokines which are capable of preventing the induction of tolerance can be targeted for blockage in vivo in conjunction with reagents which block B lymphocyte antigens as a more efficient means to induce tolerance in transplant recipients or subjects with autoimmune diseases.

[0586] In some embodiments, an assay encompassed by the present invention is a cell-free assay for screening for agents that modulate the interaction between a biomarker and/or one or more natural binding partners, comprising contacting a polypeptide and one or more natural binding partners, or biologically active portion thereof, with a test agent and determining the ability of the test compound to modulate the interaction between the polypeptide and one or more natural binding partners, or biologically active portion thereof. Binding of the test compound can be determined either directly or indirectly as described above. In one embodiment, the assay includes contacting the polypeptide, or biologically active portion thereof, with its binding partner to form an assay mixture, contacting the assay mixture with a test compound, and determining the ability of the test compound to interact with the polypeptide in the assay mixture, wherein determining the ability of the test compound to interact with the polypeptide comprises determining the ability of the test compound to preferentially bind to the polypeptide or biologically active portion thereof, as compared to the binding partner.

[0587] In some embodiments, whether for cell-based or cell-free assays, a test agent can further be assayed to determine whether it affects binding and/or activity of the interaction between the polypeptide and the one or more natural binding partners, with other binding partners. Other useful binding analysis methods include the use of real-time Biomolecular Interaction Analysis (BIA) (Sjolander and Urbaniczky (1991) Anal. Chem. 63:2338-2345 and Szabo et al. (1995) Curr. Opin. Struct. Biol. 5:699-705). As used herein, “BIA” is a technology for studying biospecific interactions in real time, without labeling any of the interactants (e.g., BIAcore). Changes in the optical phenomenon of surface plasmon resonance (SPR) can be used as an indication of real-time reactions between biological polypeptides. Polypeptides of interest can be immobilized on a BIAcore chip and multiple agents (blocking antibodies, fusion proteins, peptides, or small molecules) can be tested for binding to the polypeptide of interest. An example of using the BIA technology is described by Fitz et al. (1997) Oncogene 15:613.

[0588] The cell-free assays encompassed by the present invention are amenable to use of both soluble and/or membrane-bound forms of proteins. In the case of cell-free assays in which a membrane-bound form protein is used it can be desirable to utilize a solubilizing agent such that the membrane-bound form of the protein is maintained in solution. Examples of such solubilizing agents include non-ionic detergents such as n-octylglucoside, n-dodecylglucoside, n-dodecylmaltoside, octanoyl-N-methylglucamide, decanoyl-N-methylglucamide, Triton® X-100, Triton® X-114, Thesit®, Isotridecypoly(ethylene glycol ether)ₙ, 3-[(3-cholamidopropyl)dimethylamminio]-1-propane sulfonate (CHAPS), 3-[(3-cholamidopropyl)dimethylamminio]-2-hydroxy-1-propane sulfonate (CHAPSO), or N-dodecyl=N,N-dimethyl-3-ammonio-1-propane sulfonate.

[0589] In one or more embodiments of the above described assay methods, it can be desirable to immobilize either polypeptides to facilitate separation of complexed from uncomplexed forms of one or both of the proteins, as well as to accommodate automation of the assay. Binding of a test compound to a polypeptide, can be accomplished in any vessel suitable for containing the reactants. Examples of such vessels include microtiter plates, test tubes, and micro-centrifuge tubes. In one embodiment, a fusion protein can be provided which adds a domain that allows one or both of the proteins to be bound to a matrix. For example, glutathione-S-transferase-based polypeptide fusion proteins, or glutathione-S-transferase/target fusion proteins, can be adsorbed onto glutathione sepharose beads (Sigma Chemical, St. Louis, Mo.) or glutathione derivatized microtiter plates, which are then combined with the test compound, and the mixture incubated under conditions conducive to complex formation (e.g., at physiological conditions for salt and pH). Following incubation, the beads or microtiter plate wells are washed to remove any unbound components, the matrix immobilized in the case of beads, complex determined either directly or indirectly, for example, as described above. Alternatively, the complexes can be dissociated from the matrix, and the level of polypeptide binding or activity determined using standard techniques.

[0590] In an alternative embodiment, determining the ability of the test compound to modulate the activity of a biomarker of interest (e.g., one or more targets listed in Table 1 and/or Table 2) can be accomplished as described above for cell-based assays, such as by determining the ability of the test compound to modulate the activity of a polypeptide that functions downstream of the polypeptide. For example, levels of second messengers can be determined, the activity of the interactor polypeptide on an appropriate target can be determined, or the binding of the interactor to an appropriate target can be determined as previously described.

[0591] The present invention further pertains to novel agents identified by the above-described screening assays. Accordingly, it is within the scope of the present invention to further use an agent identified as described herein in an appropriate animal model. For example, an agent identified as described herein can be used in an animal model to determine the efficacy, toxicity, or side effects of treatment with such an agent. Alternatively, an agent identified as described herein can be used in an animal model to determine the mechanism of action of such an agent. Furthermore, the present invention pertains to uses of novel agents identified by the above-described screening assays for treatments as described herein.

[0592] 3. Diagnostic Uses and Assays

[0593] The present invention provides, in part, methods, systems, and code for accurately classifying whether a biological sample is associated with an output of interest, such as monocytes and/or macrophages that are able to have modulated phenotypes according to modulation of one or more biomarkers described herein, a cancer that is likely to respond to cancer therapy (e.g., at least one modulator of one or more targets listed in Table 1 and/or Table 2), and the like. In some embodiments, the present invention is useful for classifying a sample (e.g., from a subject) as associated with or at risk for responding to or not responding to cancer therapy (e.g, at least one modulator of biomarkers listed in Table 1 and/or Table 2) using a statistical algorithm and/or empirical data (e.g., the amount or activity of at least one target listed in Table 1 and/or Table 2). In some embodiments, the present invention encompasses methods of detecting the immune phenotype status of a monocyte and/or macrophage (e.g., M1, Type 1, M2, Type 2, etc.) based on detecting the presence, absence, and/or modulated expression of a biomarker described herein, such as those listed in Table 1, Table 2, the Examples, etc. (e.g., CD53, PSGL1, and/or VSIG4).

[0594] An exemplary method for detecting the amount or activity of a biomarker (e.g., one or more targets listed in Table 1 and/or Table 2), and thus useful for classifying whether a sample is likely or unlikely to respond to modulation of inflammatory phenotype, cancer therapy, and the like involves contacting a biological sample with an agent, such as a protein-binding agent like an antibody or antigen-binding fragment thereof, or a nucleic acid-binding agent like an oligonucleotide, capable of detecting the amount or activity of the biomarker in the biological sample. In some embodiments, the method further comprise obtaining a biological sample, such as from a test subject. In some embodiments, at least one agent is used, wherein two, three, four, five, six, seven, eight, nine, ten, or more such agents can be used in combination (e.g., in sandwich ELISAs) or in serial. In certain instances, the statistical algorithm is a single learning statistical classifier system. For example, a single learning statistical classifier system can be used to classify a sample as a based upon a prediction or probability value and the presence or level of the biomarker. The use of a single learning statistical classifier system typically classifies the sample with a sensitivity, specificity, positive predictive value, negative predictive value, and/or overall accuracy of at least about 75%, 76%, 77%, 78%, 79%, 80%, 81%, 82%, 83%, 84%, 85%, 86%, 87%, 88%, 89%, 90%, 91%, 92%, 93%, 94%, 95%, 96%, 97%, 98%, or 99%.

[0595] Other suitable statistical algorithms are well-known to those of skill in the art. For example, learning statistical classifier systems include a machine learning algorithmic technique capable of adapting to complex data sets (e.g., panel of markers of interest) and making decisions based upon such data sets. In some embodiments, a single learning statistical classifier system such as a classification tree (e.g., random forest) is used. In other embodiments, a combination of 2, 3, 4, 5, 6, 7, 8, 9, 10, or more learning statistical classifier systems are used, preferably in tandem. Examples of learning statistical classifier systems include, but are not limited to, those using inductive learning (e.g., decision/classification trees such as random forests, classification and regression trees (C&RT), boosted trees, etc.), Probably Approximately Correct (PAC) learning, connectionist learning (e.g., neural networks (NN), artificial neural networks (ANN), neuro fuzzy networks (NFN), network structures, perceptrons such as multi-layer perceptrons, multi-layer feed-forward networks, applications of neural networks, Bayesian learning in belief networks, etc.), reinforcement learning (e.g., passive learning in a known environment such as naive learning, adaptive dynamic learning, and temporal difference learning, passive learning in an unknown environment, active learning in an unknown environment, learning action-value functions, applications of reinforcement learning, etc.), and genetic algorithms and evolutionary programming. Other learning statistical classifier systems include support vector machines (e.g., Kernel methods), multivariate adaptive regression splines (MARS), Levenberg-Marquardt algorithms, Gauss-Newton algorithms, mixtures of Gaussians, gradient descent algorithms, and learning vector quantization (LVQ). In certain embodiments, the method encompassed by the present invention further comprises sending the sample classification results to a clinician, e.g., an oncologist.

[0596] In some embodiments, the diagnosis of a subject is followed by administering to the individual a therapeutically effective amount of a defined treatment based upon the diagnosis.

[0597] In some embodiments, the methods further involve obtaining a control biological sample (e.g., biological sample from a subject who does not have a cancer or whose cancer is susceptible to cancer therapy, a biological sample from the subject during remission, or a biological sample from the subject during treatment for developing a cancer progressing despite cancer therapy.

[0598] 4. Predictive Medicine

[0599] The present invention also pertains to the field of predictive medicine in which diagnostic assays, prognostic assays, and monitoring clinical trials are used for prognostic (predictive) purposes to thereby treat an individual prophylactically. Accordingly, one aspect encompassed by the present invention encompasses diagnostic assays for determining (e.g., detecting) the presence, absence, copy number, amount, and/or activity level of a biomarker described herein, such as those listed in Table 1 and/or Table 2, in the context of a biological sample (e.g., blood, serum, cells, or tissue) to thereby determine whether an individual afflicted with a cancer is likely to respond to cancer therapy (e.g., at least one modulator of biomarkers listed in Table 1 and/or Table 2), whether in an original or recurrent cancer. Such assays can be used for prognostic or predictive purpose to thereby prophylactically treat an individual prior to the onset or after recurrence of a disorder characterized by or associated with biomarker polypeptide, nucleic acid expression or activity. The skilled artisan will appreciate that any method can use one or more (e.g., combinations) of biomarkers described herein, such as those listed in Table 1 and/or Table 2. For any predictive medicine analysis, a biomarker of interest, a stratification indicator of interest (e.g., CD11b+ status, CD14+ status, etc.), or any combination thereof, can be analyzed.

[0600] Another aspect encompassed by the present invention encompasses monitoring the influence of agents (e.g., drugs, compounds, and small nucleic acid-based molecules) on the expression or activity of a target listed in Table 1 and/or Table 2 and/or inflammatory phenotypes of cells of interest. These and other agents are described in further detail in the following sections.

[0601] The skilled artisan will also appreciate that, in certain embodiments, the methods encompassed by the present invention implement a computer program and computer system. For example, a computer program can be used to perform the algorithms described herein. A computer system can also store and manipulate data generated by the methods encompassed by the present invention which comprises a plurality of biomarker signal changes/profiles which can be used by a computer system in implementing the methods of this invention. In certain embodiments, a computer system receives biomarker expression data; (ii) stores the data; and (iii) compares the data in any number of ways described herein (e.g., analysis relative to appropriate controls) to determine the state of informative biomarkers from cancerous or pre-cancerous tissue. In other embodiments, a computer system (i) compares the determined expression biomarker level to a threshold value; and (ii) outputs an indication of whether said biomarker level is significantly modulated (e.g., above or below) the threshold value, or a phenotype based on said indication.

[0602] In certain embodiments, such computer systems are also considered part encompassed by the present invention. Numerous types of computer systems can be used to implement the analytic methods of this invention according to knowledge possessed by a skilled artisan in the bioinformatics and/or computer arts. Several software components can be loaded into memory during operation of such a computer system. The software components can comprise both software components that are standard in the art and components that are special to the present invention (e.g., dCHIP software described in Lin et al. (2004) Bioinformatics 20, 1233-1240; radial basis machine learning algorithms (RBM) known in the art).

[0603] The methods encompassed by the present invention can also be programmed or modeled in mathematical software packages that allow symbolic entry of equations and high-level specification of processing, including specific algorithms to be used, thereby freeing a user of the need to procedurally program individual equations and algorithms. Such packages include, e.g., Matlab from Mathworks (Natick, Mass.), Mathematica from Wolfram Research (Champaign, Ill.) or S-Plus from MathSoft (Seattle, Wash.).

[0604] In certain embodiments, the computer comprises a database for storage of biomarker data. Such stored profiles can be accessed and used to perform comparisons of interest at a later point in time. For example, biomarker expression profiles of a sample derived from the non-cancerous tissue of a subject and/or profiles generated from population-based distributions of informative loci of interest in relevant populations of the same species can be stored and later compared to that of a sample derived from the cancerous tissue of the subject or tissue suspected of being cancerous of the subject.

[0605] In addition to the exemplary program structures and computer systems described herein, other, alternative program structures and computer systems will be readily apparent to the skilled artisan. Such alternative systems, which do not depart from the above described computer system and programs structures either in spirit or in scope, are therefore intended to be comprehended within the accompanying claims.

[0606] Furthermore, the prognostic assays described herein can be used to determine whether a subject can be administered an agent (e.g., an agonist, antagonist, peptidomimetic, polypeptide, peptide, nucleic acid, small molecule, or other drug candidate) to treat a disease or disorder associated with the aberrant biomarker expression or activity.

[0607] 5. Clinical Efficacy

[0608] Clinical efficacy can be measured by any method known in the art. For example, the response to a cancer therapy (e.g., at least one modulator of biomarkers listed in Table 1 and/or Table 2), relates to any response of the cancer, e.g., a tumor, to the therapy, preferably to a change in the number of cancer cells, tumor mass, and/or tumor volume, such as after initiation of neoadjuvant or adjuvant chemotherapy. Tumor response can be assessed in a neoadjuvant or adjuvant situation where the size of a tumor after systemic intervention can be compared to the initial size and dimensions as measured by CT, PET, mammogram, ultrasound or palpation and the cellularity of a tumor can be estimated histologically and compared to the cellularity of a tumor biopsy taken before initiation of treatment. Response can also be assessed by caliper measurement or pathological examination of the tumor after biopsy or surgical resection. Response can be recorded in a quantitative fashion like percentage change in tumor volume or cellularity or using a semi-quantitative scoring system such as residual cancer burden (Symmans et al., J. Clin. Oncol. (2007) 25:4414-4422) or Miller-Payne score (Ogston et al., (2003) Breast (Edinburgh, Scotland) 12:320-327) in a qualitative fashion like “pathological complete response” (pCR), “clinical complete remission” (cCR), “clinical partial remission” (cPR), “clinical stable disease” (cSD), “clinical progressive disease” (cPD) or other qualitative criteria. Assessment of tumor response can be performed early after the onset of neoadjuvant or adjuvant therapy, e.g, after a few hours, days, weeks or preferably after a few months. A typical endpoint for response assessment is upon termination of neoadjuvant chemotherapy or upon surgical removal of residual tumor cells and/or the tumor bed.

[0609] In some embodiments, clinical efficacy of the therapeutic treatments described herein can be determined by measuring the clinical benefit rate (CBR). The clinical benefit rate is measured by determining the sum of the percentage of patients who are in complete remission (CR), the number of patients who are in partial remission (PR) and the number of patients having stable disease (SD) at a time point at least 6 months out from the end of therapy. The shorthand for this formula is CBR=CR+PR+SD over 6 months. In some embodiments, the CBR for a particular modulator of biomarkers listed in Table 1 and/or Table 2 therapeutic regimen is at least 25%, 30%, 35%, 40%, 45%, 50%, 55%, 60%, 65%, 70%, 75%, 80%, 85%, or more.

[0610] Additional criteria for evaluating the response to cancer therapy (e.g., e.g., at least one modulator of biomarkers listed in Table 1 and/or Table 2) are related to “survival,” which includes all of the following: survival until mortality, also known as overall survival (wherein said mortality can be either irrespective of cause or tumor related); “recurrence-free survival” (wherein the term recurrence shall include both localized and distant recurrence); metastasis free survival; disease free survival (wherein the term disease shall include cancer and diseases associated therewith). The length of said survival can be calculated by reference to a defined start point (e.g., time of diagnosis or start of treatment) and end point (e.g., death, recurrence or metastasis). In addition, criteria for efficacy of treatment can be expanded to include response to chemotherapy, probability of survival, probability of metastasis within a given time period, and probability of tumor recurrence.

[0611] For example, in order to determine appropriate threshold values, a particular modulator of one or more biomarkers (e.g., targets listed in Table 1 and/or Table 2) can be administered to a population of subjects and the outcome can be correlated to biomarker measurements that were determined prior to administration of any cancer therapy (e.g., e.g., at least one modulator of biomarkers listed in Table 1 and/or Table 2). The outcome measurement can be pathologic response to therapy given in the neoadjuvant setting. Alternatively, outcome measures, such as overall survival and disease-free survival can be monitored over a period of time for subjects following cancer therapy (e.g., at least one modulator of biomarkers listed in Table 1 and/or Table 2) for whom biomarker measurement values are known. In certain embodiments, the same doses of the agent modulating at least one biomarkers listed in Table 1 and/or Table 2 are administered to each subject. In related embodiments, the doses administered are standard doses known in the art for the agent modulating at least one biomarker encompassed by the present invention (e.g., one or more targets listed in Table 1 and/or Table 2). The period of time for which subjects are monitored can vary. For example, subjects can be monitored for at least 2, 4, 6, 8, 10, 12, 14, 16, 18, 20, 25, 30, 35, 40, 45, 50, 55, or 60 months. Biomarker measurement threshold values that correlate to outcome of an cancer therapy (e.g., at least one modulator of biomarkers listed in Table 1 and/or Table 2) can be determined using methods such as those described in the Examples section.

[0612] 6. Analyzing Biomarker Nucleic Acids and Polypeptides

[0613] a. Sample Collection and Preparation

[0614] In some embodiments, biomarker amount and/or activity measurement(s) in a sample from a subject is compared to a pre-determined control (standard) sample. The sample from the subject is typically from a diseased tissue, such as cancer cells or tissues. The control sample can be from the same subject or from a different subject. The control sample is typically a normal, non-diseased sample. However, in some embodiments, such as for staging of disease or for evaluating the efficacy of treatment, the control sample can be from a diseased tissue. The control sample can be a combination of samples from several different subjects. In some embodiments, the biomarker amount and/or activity measurement(s) from a subject is compared to a pre-determined level. This pre-determined level is typically obtained from normal samples. As described herein, a “pre-determined” biomarker amount and/or activity measurement(s) can be a biomarker amount and/or activity measurement(s) used to, by way of example only, evaluate a subject that can be selected for treatment, evaluate a response to cancer therapy (e.g., at least one modulator of one or more biomarkers listed in Table 1 and/or Table 2), and/or evaluate a response to a combination cancer therapy (e.g., at least one modulator of one or more biomarkers listed in Table 1 and/or Table 2 in combination of at least one immunotherapy). A pre-determined biomarker amount and/or activity measurement(s) can be determined in populations of patients with or without cancer. The pre-determined biomarker amount and/or activity measurement(s) can be a single number, equally applicable to every patient, or the pre-determined biomarker amount and/or activity measurement(s) can vary according to specific subpopulations of patients. Age, weight, height, and other factors of a subject can affect the pre-determined biomarker amount and/or activity measurement(s) of the individual. Furthermore, the pre-determined biomarker amount and/or activity can be determined for each subject individually. In one embodiment, the amounts determined and/or compared in a method described herein are based on absolute measurements.

[0615] In another embodiment, the amounts determined and/or compared in a method described herein are based on relative measurements, such as ratios (e.g., biomarker copy numbers, level, and/or activity before a treatment vs. after a treatment, such biomarker measurements relative to a spiked or man-made control, such biomarker measurements relative to the expression of a housekeeping gene, and the like). For example, the relative analysis can be based on the ratio of pre-treatment biomarker measurement as compared to post-treatment biomarker measurement. Pre-treatment biomarker measurement can be made at any time prior to initiation of cancer therapy. Post-treatment biomarker measurement can be made at any time after initiation of cancer therapy. In some embodiments, post-treatment biomarker measurements are made 1, 2, 3, 4, 5, 6, 7, 8, 9, 10, 11, 12, 13, 14, 15, 16, 17, 18, 19, 20 weeks or more after initiation of cancer therapy, and even longer toward indefinitely for continued monitoring. Treatment can comprise cancer therapy, such as a therapeutic regimen comprising one or more modulators of at least one target listed in Table 1 and/or Table 2, either alone or in combination with other cancer agents, such as immune checkpoint inhibitors.

[0616] The pre-determined biomarker amount and/or activity measurement(s) can be any suitable standard. For example, the pre-determined biomarker amount and/or activity measurement(s) can be obtained from the same or a different human for whom a patient selection is being assessed. In one embodiment, the pre-determined biomarker amount and/or activity measurement(s) can be obtained from a previous assessment of the same patient. In such a manner, the progress of the selection of the patient can be monitored over time. In addition, the control can be obtained from an assessment of another human or multiple humans, e.g., selected groups of humans, if the subject is a human. In such a manner, the extent of the selection of the human for whom selection is being assessed can be compared to suitable other humans, e.g., other humans who are in a similar situation to the human of interest, such as those suffering from similar or the same condition(s) and/or of the same ethnic group.

[0617] In some embodiments encompassed by the present invention the change of biomarker amount and/or activity measurement(s) from the pre-determined level is about 0.1, 0.2, 0.3, 0.4, 0.5, 0.6, 0.7, 0.8, 0.9, 1.0, 1.5, 2.0, 2.5, 3.0, 3.5, 4.0, 4.5, or 5.0 fold or greater, or any range in between, inclusive. Such cut-off values apply equally when the measurement is based on relative changes, such as based on the ratio of pre-treatment biomarker measurement as compared to post-treatment biomarker measurement.

[0618] Biological samples can be collected from a variety of sources from a patient including a body fluid sample, cell sample, or a tissue sample comprising nucleic acids and/or proteins. “Body fluids” refer to fluids that are excreted or secreted from the body as well as fluids that are normally not (e.g., amniotic fluid, aqueous humor, bile, blood and blood plasma, cerebrospinal fluid, cerumen and earwax, cowper's fluid or pre-ejaculatory fluid, chyle, chyme, stool, female ejaculate, interstitial fluid, intracellular fluid, lymph, menses, breast milk, mucus, pleural fluid, pus, saliva, sebum, semen, serum, sweat, synovial fluid, tears, urine, vaginal lubrication, vitreous humor, vomit). In a preferred embodiment, the subject and/or control sample is selected from the group consisting of cells, cell lines, histological slides, paraffin embedded tissues, biopsies, whole blood, nipple aspirate, serum, plasma, buccal scrape, saliva, cerebrospinal fluid, urine, stool, and bone marrow. In one embodiment, the sample is serum, plasma, or urine. In another embodiment, the sample is serum.

[0619] The samples can be collected from individuals repeatedly over a longitudinal period of time (e.g., once or more on the order of days, weeks, months, annually, biannually, etc.). Obtaining numerous samples from an individual over a period of time can be used to verify results from earlier detections and/or to identify an alteration in biological pattern as a result of, for example, disease progression, drug treatment, etc. For example, subject samples can be taken and monitored every month, every two months, or combinations of one, two, or three month intervals according to the present invention. In addition, the biomarker amount and/or activity measurements of the subject obtained over time can be conveniently compared with each other, as well as with those of normal controls during the monitoring period, thereby providing the subject's own values, as an internal, or personal, control for long-term monitoring.

[0620] Sample preparation and separation can involve any of the procedures, depending on the type of sample collected and/or analysis of biomarker measurement(s). Such procedures include, by way of example only, concentration, dilution, adjustment of pH, removal of high abundance polypeptides (e.g., albumin, gamma globulin, and transferrin, etc.), addition of preservatives and calibrants, addition of protease inhibitors, addition of denaturants, desalting of samples, concentration of sample proteins, extraction and purification of lipids.

[0621] The sample preparation can also isolate molecules that are bound in non-covalent complexes to other protein (e.g., carrier proteins). This process can isolate those molecules bound to a specific carrier protein (e.g., albumin), or use a more general process, such as the release of bound molecules from all carrier proteins via protein denaturation, for example using an acid, followed by removal of the carrier proteins.

[0622] Removal of undesired proteins (e.g., high abundance, uninformative, or undetectable proteins) from a sample can be achieved using high affinity reagents, high molecular weight filters, ultracentrifugation and/or electrodialysis. High affinity reagents include antibodies or other reagents (e.g., aptamers) that selectively bind to high abundance proteins. Sample preparation could also include ion exchange chromatography, metal ion affinity chromatography, gel filtration, hydrophobic chromatography, chromatofocusing, adsorption chromatography, isoelectric focusing and related techniques. Molecular weight filters include membranes that separate molecules on the basis of size and molecular weight. Such filters can further employ reverse osmosis, nanofiltration, ultrafiltration and microfiltration.

[0623] Ultracentrifugation is a method for removing undesired polypeptides from a sample. Ultracentrifugation is the centrifugation of a sample at about 15,000-60,000 rpm while monitoring with an optical system the sedimentation (or lack thereof) of particles. Electrodialysis is a procedure which uses an electromembrane or semipermable membrane in a process in which ions are transported through semi-permeable membranes from one solution to another under the influence of a potential gradient. Since the membranes used in electrodialysis can have the ability to selectively transport ions having positive or negative charge, reject ions of the opposite charge, or to allow species to migrate through a semipermable membrane based on size and charge, it renders electrodialysis useful for concentration, removal, or separation of electrolytes.

[0624] Separation and purification in the present invention can include any procedure known in the art, such as capillary electrophoresis (e.g., in capillary or on-chip) or chromatography (e.g., in capillary, column or on a chip). Electrophoresis is a method which can be used to separate ionic molecules under the influence of an electric field. Electrophoresis can be conducted in a gel, capillary, or in a microchannel on a chip. Examples of gels used for electrophoresis include starch, acrylamide, polyethylene oxides, agarose, or combinations thereof. A gel can be modified by its cross-linking, addition of detergents, or denaturants, immobilization of enzymes or antibodies (affinity electrophoresis) or substrates (zymography) and incorporation of a pH gradient. Examples of capillaries used for electrophoresis include capillaries that interface with an electrospray.

[0625] Capillary electrophoresis (CE) is preferred for separating complex hydrophilic molecules and highly charged solutes. CE technology can also be implemented on microfluidic chips. Depending on the types of capillary and buffers used, CE can be further segmented into separation techniques such as capillary zone electrophoresis (CZE), capillary isoelectric focusing (CIEF), capillary isotachophoresis (cITP) and capillary electrochromatography (CEC). An embodiment to couple CE techniques to electrospray ionization involves the use of volatile solutions, for example, aqueous mixtures containing a volatile acid and/or base and an organic such as an alcohol or acetonitrile.

[0626] Capillary isotachophoresis (cITP) is a technique in which the analytes move through the capillary at a constant speed but are nevertheless separated by their respective mobilities. Capillary zone electrophoresis (CZE), also known as free-solution CE (FSCE), is based on differences in the electrophoretic mobility of the species, determined by the charge on the molecule, and the frictional resistance the molecule encounters during migration which is often directly proportional to the size of the molecule. Capillary isoelectric focusing (CIEF) allows weakly-ionizable amphoteric molecules, to be separated by electrophoresis in a pH gradient. CEC is a hybrid technique between traditional high performance liquid chromatography (HPLC) and CE.

[0627] Separation and purification techniques used in the present invention include any chromatography procedures known in the art. Chromatography can be based on the differential adsorption and elution of certain analytes or partitioning of analytes between mobile and stationary phases. Different examples of chromatography include, but not limited to, liquid chromatography (LC), gas chromatography (GC), high performance liquid chromatography (HPLC), etc.

[0628] b. Analyzing Biomarker Nucleic Acids and Poypeptides

[0629] Biomarker nucleic acids and/or biomarker polypeptides can be analyzed according to the methods described herein and techniques known to the skilled artisan to identify such genetic or expression alterations useful for the present invention including, but not limited to, 1) an alteration in the level of a biomarker transcript or polypeptide, 2) a deletion or addition of one or more nucleotides from a biomarker gene, 4) a substitution of one or more nucleotides of a biomarker gene, 5) aberrant modification of a biomarker gene, such as an expression regulatory region, and the like.

[0630] c. Methods for Detection of Copy Number and/or Genomic Nucleic Acid Mutations

[0631] Methods of evaluating the copy number and/or genomic nucleic acid status (e.g. mutations) of a biomarker nucleic acid are well-known to those of skill in the art. The presence or absence of chromosomal gain or loss can be evaluated simply by a determination of copy number of the regions or markers identified herein.

[0632] In one embodiment, a biological sample is tested for the presence of copy number changes in genomic loci containing the genomic marker. In some embodiments, the increased copy number of at least one target listed in Table 1, and/or the decreased copy number of at least one target listed in Table 2 is predictive of poor outcome of cancer therapy (e.g., at least one modulator of biomarkers listed in Table 1 and/or Table 2). A copy number of at least 3, 4, 5, 6, 7, 8, 9, or 10 of at least one target listed in Table 1 and/or Table 2 is predictive of likely responsive to cancer therapy (e.g., at least one modulator of biomarkers listed in Table 1 and/or Table 2).

[0633] Methods of evaluating the copy number of a biomarker locus include, but are not limited to, hybridization-based assays. Hybridization-based assays include, but are not limited to, traditional “direct probe” methods, such as Southern blots, in situ hybridization (e.g., FISH and FISH plus SKY) methods, and “comparative probe” methods, such as comparative genomic hybridization (CGH), e.g., cDNA-based or oligonucleotide-based CGH. The methods can be used in a wide variety of formats including, but not limited to, substrate (e.g., membrane or glass) bound methods or array-based approaches.

[0634] In one embodiment, evaluating the biomarker gene copy number in a sample involves a Southern Blot. In a Southern Blot, the genomic DNA (typically fragmented and separated on an electrophoretic gel) is hybridized to a probe specific for the target region. Comparison of the intensity of the hybridization signal from the probe for the target region with control probe signal from analysis of normal genomic DNA (e.g., a non-amplified portion of the same or related cell, tissue, organ, etc.) provides an estimate of the relative copy number of the target nucleic acid. Alternatively, a Northern blot can be utilized for evaluating the copy number of encoding nucleic acid in a sample. In a Northern blot, mRNA is hybridized to a probe specific for the target region. Comparison of the intensity of the hybridization signal from the probe for the target region with control probe signal from analysis of normal RNA (e.g., a non-amplified portion of the same or related cell, tissue, organ, etc.) provides an estimate of the relative copy number of the target nucleic acid. Alternatively, other methods well-known in the art to detect RNA can be used, such that higher or lower expression relative to an appropriate control (e.g., a non-amplified portion of the same or related cell tissue, organ, etc.) provides an estimate of the relative copy number of the target nucleic acid.

[0635] An alternative means for determining genomic copy number is in situ hybridization (e.g., Angerer (1987) Meth. Enzymol 152: 649). Generally, in situ hybridization comprises the following steps: (1) fixation of tissue or biological structure to be analyzed; (2) prehybridization treatment of the biological structure to increase accessibility of target DNA, and to reduce nonspecific binding; (3) hybridization of the mixture of nucleic acids to the nucleic acid in the biological structure or tissue; (4) post-hybridization washes to remove nucleic acid fragments not bound in the hybridization and (5) detection of the hybridized nucleic acid fragments. The reagent used in each of these steps and the conditions for use vary depending on the particular application. In a typical in situ hybridization assay, cells are fixed to a solid support, typically a glass slide. If a nucleic acid is to be probed, the cells are typically denatured with heat or alkali. The cells are then contacted with a hybridization solution at a moderate temperature to permit annealing of labeled probes specific to the nucleic acid sequence encoding the protein. The targets (e.g., cells) are then typically washed at a pre-determined stringency or at an increasing stringency until an appropriate signal to noise ratio is obtained. The probes are typically labeled, e.g., with radioisotopes or fluorescent reporters. In one embodiment, probes are sufficiently long so as to specifically hybridize with the target nucleic acid(s) under stringent conditions. Probes generally range in length from about 200 bases to about 1000 bases. In some applications it is necessary to block the hybridization capacity of repetitive sequences. Thus, in some embodiments, tRNA, human genomic DNA, or Cot-I DNA is used to block non-specific hybridization.

[0636] An alternative means for determining genomic copy number is comparative genomic hybridization. In general, genomic DNA is isolated from normal reference cells, as well as from test cells (e.g., tumor cells) and amplified, if necessary. The two nucleic acids are differentially labeled and then hybridized in situ to metaphase chromosomes of a reference cell. The repetitive sequences in both the reference and test DNAs are either removed or their hybridization capacity is reduced by some means, for example by prehybridization with appropriate blocking nucleic acids and/or including such blocking nucleic acid sequences for said repetitive sequences during said hybridization. The bound, labeled DNA sequences are then rendered in a visualizable form, if necessary. Chromosomal regions in the test cells which are at increased or decreased copy number can be identified by detecting regions where the ratio of signal from the two DNAs is altered. For example, those regions that have decreased in copy number in the test cells will show relatively lower signal from the test DNA than the reference compared to other regions of the genome. Regions that have been increased in copy number in the test cells will show relatively higher signal from the test DNA. Where there are chromosomal deletions or multiplications, differences in the ratio of the signals from the two labels will be detected and the ratio will provide a measure of the copy number. In another embodiment of CGH, array CGH (aCGH), the immobilized chromosome element is replaced with a collection of solid support bound target nucleic acids on an array, allowing for a large or complete percentage of the genome to be represented in the collection of solid support bound targets. Target nucleic acids can comprise cDNAs, genomic DNAs, oligonucleotides (e.g., to detect single nucleotide polymorphisms) and the like. Array-based CGH can also be performed with single-color labeling (as opposed to labeling the control and the possible tumor sample with two different dyes and mixing them prior to hybridization, which will yield a ratio due to competitive hybridization of probes on the arrays). In single color CGH, the control is labeled and hybridized to one array and absolute signals are read, and the possible tumor sample is labeled and hybridized to a second array (with identical content) and absolute signals are read. Copy number difference is calculated based on absolute signals from the two arrays. Methods of preparing immobilized chromosomes or arrays and performing comparative genomic hybridization are well-known in the art (see, e.g., U.S. Pat. Nos. 6,335,167; 6,197,501; 5,830,645; and 5,665,549 and Albertson (1984) EMBO J. 3:1227-1234; Pinkel (1988) Proc. Natl. Acad. Sci. U.S.A. 85:9138-9142; EP Pat. Publ. No. 430,402; Methods in Molecular Biology, Vol. 33: In situ Hybridization Protocols, Choo, ed., Humana Press, Totowa, N.J. (1994), etc.). In another embodiment, the hybridization protocol of Pinkel, et al. (1998) Nat. Genet. 20:207-211, or of Kallioniemi (1992) Proc. Natl. Acad. Sci. U.S.A. 89:5321-5325 (1992) is used.

[0637] In still another embodiment, amplification-based assays can be used to measure copy number. In such amplification-based assays, the nucleic acid sequences act as a template in an amplification reaction (e.g., Polymerase Chain Reaction (PCR). In a quantitative amplification, the amount of amplification product will be proportional to the amount of template in the original sample. Comparison to appropriate controls, e.g., healthy tissue, provides a measure of the copy number.

[0638] Methods of “quantitative” amplification are well-known to those of skill in the art. For example, quantitative PCR involves simultaneously co-amplifying a known quantity of a control sequence using the same primers. This provides an internal standard that can be used to calibrate the PCR reaction. Detailed protocols for quantitative PCR are provided in Innis, et at. (1990) PCR Protocols, A Guide to Methods and Applications, Academic Press, Inc. N.Y.). Measurement of DNA copy number at microsatellite loci using quantitative PCR analysis is described in Ginzonger et al. (2000) Cancer Res. 60:5405-5409. The known nucleic acid sequence for the genes is sufficient to enable one of skill in the art to routinely select primers to amplify any portion of the gene. Fluorogenic quantitative PCR can also be used in the methods encompassed by the present invention. In fluorogenic quantitative PCR, quantitation is based on amount of fluorescence signals, e.g., TaqMan and SYBR green.

[0639] Other suitable amplification methods include, but are not limited to, ligase chain reaction (LCR) (see Wu and Wallace (1989) Genomics 4:560, Landegren, et al. (1988) Science 241:1077, and Barringer et al. (1990) Gene 89:117), transcription amplification (Kwoh et al. (1989) Proc. Natl. Acad. Sci. U.S.A. 86:1173), self-sustained sequence replication (Guatelli et al. (1990) Proc. Natl. Acad. Sci. U.S.A. 87:1874), dot PCR, and linker adapter PCR, etc.

[0640] Loss of heterozygosity (LOH) and major copy proportion (MCP) mapping (Wang et al. (2004) Cancer Res. 64:64-71; Seymour et al. (1994) Cancer Res. 54:2761-2764; Hahn et at. (1995) Cancer Res. 55:4670-4675; Kimura et al. (1996) Genes Chromosomes Cancer 17:88-93: Li et al. (2008) MBC Bioinform. 9:204-219) can also be used to identify regions of amplification or deletion.

[0641] d. Methods for Detection of Biomarker Nucleic Acid Expression

[0642] Biomarker expression can be assessed by any of a wide variety of well-known methods for detecting expression of a transcribed molecule or protein. Non-limiting examples of such methods include immunological methods for detection of secreted, cell-surface, cytoplasmic, or nuclear proteins, protein purification methods, protein function or activity assays, nucleic acid hybridization methods, nucleic acid reverse transcription methods, and nucleic acid amplification methods.

[0643] In preferred embodiments, activity of a particular gene is characterized by a measure of gene transcript (e.g., mRNA), by a measure of the quantity of translated protein, or by a measure of gene product activity. Marker expression can be monitored in a variety of ways, including by detecting mRNA levels, protein levels, or protein activity, any of which can be measured using standard techniques. Detection can involve quantification of the level of gene expression (e.g., genomic DNA, cDNA, mRNA, protein, or enzyme activity), or, alternatively, can be a qualitative assessment of the level of gene expression, in particular in comparison with a control level. The type of level being detected will be clear from the context.

[0644] In another embodiment, detecting or determining expression levels of a biomarker and functionally similar homologs thereof, including a fragment or genetic alteration thereof (e.g., in regulatory or promoter regions thereof) comprises detecting or determining RNA levels for the marker of interest. In one embodiment, one or more cells from the subject to be tested are obtained and RNA is isolated from the cells. In a preferred embodiment, a sample of breast tissue cells is obtained from the subject.

[0645] In one embodiment, RNA is obtained from a single cell. For example, a cell can be isolated from a tissue sample by laser capture microdissection (LCM). Using this technique, a cell can be isolated from a tissue section, including a stained tissue section, thereby assuring that the desired cell is isolated (see, e.g., Bonner et al. (1997) Science 278:1481; Emmert-Buck et al. (1996) Science 274:998; Fend et al. (1999) Am. J. Path. 154: 61 and Murakami et al. (2000) Kidney Int. 58:1346). For example, Murakami et al., supra, describe isolation of a cell from a previously immunostained tissue section.

[0646] It is also be possible to obtain cells from a subject and culture the cells in vitro, such as to obtain a larger population of cells from which RNA can be extracted. Methods for establishing cultures of non-transformed cells, i.e., primary cell cultures, are known in the art.

[0647] When isolating RNA from tissue samples or cells from individuals, it can be important to prevent any further changes in gene expression after the tissue or cells has been removed from the subject. Changes in expression levels are known to change rapidly following perturbations, e.g., heat shock or activation with lipopolysaccharide (LPS) or other reagents. In addition, the RNA in the tissue and cells can quickly become degraded. Accordingly, in a preferred embodiment, the tissue or cells obtained from a subject is snap frozen as soon as possible.

[0648] RNA can be extracted from the tissue sample by a variety of methods, e.g., the guanidium thiocyanate lysis followed by CsCl centrifugation (Chirgwin et al. (1979) Biochem. 18:5294-5299). RNA from single cells can be obtained as described in methods for preparing cDNA libraries from single cells, such as those described in Dulac (1998) Curr. Top. Dev. Biol. 36:245 and Jena et al. (1996) J. Immunol. Methods 190:199. Care to avoid RNA degradation must be taken, e.g., by inclusion of RNAsin.

[0649] The RNA sample can then be enriched in particular species. In one embodiment, poly(A)+ RNA is isolated from the RNA sample. In general, such purification takes advantage of the poly-A tails on mRNA. In particular and as noted above, poly-T oligonucleotides can be immobilized within on a solid support to serve as affinity ligands for mRNA. Kits for this purpose are commercially available, e.g., the MessageMaker kit (Life Technologies, Grand Island, N.Y.).

[0650] In a preferred embodiment, the RNA population is enriched in marker sequences.

[0651] Enrichment can be undertaken, e.g., by primer-specific cDNA synthesis, or multiple rounds of linear amplification based on cDNA synthesis and template-directed in vitro transcription (see, e.g., Wang et al. (1989) Proc. Natl. Acad. Sci. U.S.A. 86: 9717; Dulac et al., supra, and Jena et al., supra).

[0652] The population of RNA, enriched or not in particular species or sequences, can further be amplified. As defined herein, an “amplification process” is designed to strengthen, increase, or augment a molecule within the RNA. For example, where RNA is mRNA, an amplification process such as RT-PCR can be utilized to amplify the mRNA, such that a signal is detectable or detection is enhanced. Such an amplification process is beneficial particularly when the biological, tissue, or tumor sample is of a small size or volume.

[0653] Various amplification and detection methods can be used. For example, it is within the scope encompassed by the present invention to reverse transcribe mRNA into cDNA followed by polymerase chain reaction (RT-PCR); or, to use a single enzyme for both steps as described in U.S. Pat. No. 5,322,770, or reverse transcribe mRNA into cDNA followed by symmetric gap ligase chain reaction (RT-AGLCR) as described by Marshall et al. (1994) PCR Methods Appls. 4:80-84. Real-time PCR can also be used.

[0654] Other known amplification methods which can be utilized herein include but are not limited to the so-called “NASBA” or “3SR” technique described in Guatelli et al. (1990) Proc. Natl. Acad. Sci. U.S.A. 87:1874-1878 and also described in Compton et al. (1991) Nature 350:91-92: Q-beta amplification as described in EP Pat. Publ. No. 4544610; strand displacement amplification (as described in Walker et al. (1996) Clin. Chem. 42:9-13 and EP Pat. Publ. No. 684315: target mediated amplification, as described by PCT Publ. No. WO 93/22461; PCR; ligase chain reaction (LCR) (see, e.g., Wu and Wallace (1989) Genomics 4:560, Landegren et al. (1988) Science 241:1077); self-sustained sequence replication (SSR) (see, e.g., Guatelli et al. (1990) Proc. Nat. Acad. Sci. U.S.A. 87:1874); and transcription amplification (see, e.g., Kwoh et al. (1989) Proc. Nat. Acad. Sci. U.S.A. 86:1173).

[0655] Many techniques are known in the state of the art for determining absolute and relative levels of gene expression, commonly used techniques suitable for use in the present invention include Northern analysis, RNase protection assays (RPA), microarrays and PCR-based techniques, such as quantitative PCR and differential display PCR. For example, Northern blotting involves running a preparation of RNA on a denaturing agarose gel, and transferring it to a suitable support, such as activated cellulose, nitrocellulose or glass or nylon membranes. Radiolabeled cDNA or RNA is then hybridized to the preparation, washed and analyzed by autoradiography.

[0656] In situ hybridization visualization can also be employed, wherein a radioactively labeled antisense RNA probe is hybridized with a thin section of a biopsy sample, washed, cleaved with RNase and exposed to a sensitive emulsion for autoradiography. The samples can be stained with hematoxylin to demonstrate the histological composition of the sample, and dark field imaging with a suitable light filter shows the developed emulsion. Non-radioactive labels such as digoxigenin can also be used.

[0657] Alternatively, mRNA expression can be detected on a DNA array, chip or a microarray. Labeled nucleic acids of a test sample obtained from a subject can be hybridized to a solid surface comprising biomarker DNA. Positive hybridization signal is obtained with the sample containing biomarker transcripts. Methods of preparing DNA arrays and their use are well-known in the art (see, e.g., U.S. Pat. Numbers 6,618,6796; 6,379,897; 6,664,377; 6,451,536; and 6,548,257; U.S. Pat. Publ. No. 2003/0157485; and Schena el al. (1995) Science 20:467-470; Gerhold el al. (1999) Trends Biochem. Sci. 24:168-173; and Lennon et al. (2000) Drug Discovery Today 5:59-65). Serial Analysis of Gene Expression (SAGE) can also be performed (See for example U.S. Pat. Publ. No. 2003/0215858).

[0658] To monitor mRNA levels, for example, mRNA is extracted from the biological sample to be tested, reverse transcribed, and fluorescently-labeled cDNA probes are generated. The microarrays capable of hybridizing to marker cDNA are then probed with the labeled cDNA probes, the slides scanned and fluorescence intensity measured. This intensity correlates with the hybridization intensity and expression levels.

[0659] Types of probes that can be used in the methods described herein include cDNA, riboprobes, synthetic oligonucleotides and genomic probes. The type of probe used will generally be dictated by the particular situation, such as riboprobes for in situ hybridization, and cDNA for Northern blotting, for example. In one embodiment, the probe is directed to nucleotide regions unique to the RNA. The probes can be as short as is required to differentially recognize marker mRNA transcripts, and can be as short as, for example, 15 bases; however, probes of at least 17, 18, 19 or 20 or more bases can be used. In one embodiment, the primers and probes hybridize specifically under stringent conditions to a DNA fragment having the nucleotide sequence corresponding to the marker. As herein used, the term “stringent conditions” means hybridization will occur only if there is at least 95% identity in nucleotide sequences. In another embodiment, hybridization under “stringent conditions” occurs when there is at least 97% identity between the sequences.

[0660] The form of labeling of the probes can be any that is appropriate, such as the use of radioisotopes, for example, ³²P and ³⁵S. Labeling with radioisotopes can be achieved, whether the probe is synthesized chemically or biologically, by the use of suitably labeled bases.

[0661] In one embodiment, the biological sample contains polypeptide molecules from the test subject. Alternatively, the biological sample can contain mRNA molecules from the test subject or genomic DNA molecules from the test subject.

[0662] In another embodiment, the methods further involve obtaining a control biological sample from a control subject, contacting the control sample with a compound or agent capable of detecting marker polypeptide, mRNA, genomic DNA, or fragments thereof, such that the presence of the marker polypeptide, mRNA, genomic DNA, or fragments thereof, is detected in the biological sample, and comparing the presence of the marker polypeptide, mRNA, genomic DNA, or fragments thereof, in the control sample with the presence of the marker polypeptide, mRNA, genomic DNA, or fragments thereof in the test sample.

[0663] e. Methods for Detection of Biomarker Protein Expression

[0664] The activity or level of a biomarker protein can be detected and/or quantified by detecting or quantifying the expressed polypeptide. The polypeptide can be detected and quantified by any of a number of means well-known to those of skill in the art. Aberrant levels of polypeptide expression of the polypeptides encoded by a biomarker nucleic acid and functionally similar homologs thereof, including a fragment or genetic alteration thereof (e.g., in regulatory or promoter regions thereof) are associated with the likelihood of response of a cancer to a modulator of T cell mediated cytotoxicity alone or in combination with an immunotherapy treatment. Any method known in the art for detecting polypeptides can be used. Such methods include, but are not limited to, immunodiffusion, immunoelectrophoresis, radioimmunoassay (RIA), enzyme-linked immunosorbent assays (ELISAs), immunofluorescent assays, Western blotting, binder-ligand assays, immunohistochemical techniques, agglutination, complement assays, high performance liquid chromatography (HPLC), thin layer chromatography (TLC), hyperdiffusion chromatography, and the like (e.g., Basic and Clinical Immunology, Sites and Terr, eds., Appleton and Lange, Norwalk, Conn. pp 217-262, 1991). Preferred are binder-ligand immunoassay methods including reacting antibodies with an epitope or epitopes and competitively displacing a labeled polypeptide or derivative thereof.

[0665] For example, ELISA and RIA procedures can be conducted such that a desired biomarker protein standard is labeled (with a radioisotope such as ¹²⁵I or ³⁵S, or an assayable enzyme, such as horseradish peroxidase or alkaline phosphatase), and, together with the unlabeled sample, brought into contact with the corresponding antibody, whereon a second antibody is used to bind the first, and radioactivity or the immobilized enzyme assayed (competitive assay). Alternatively, the biomarker protein in the sample is allowed to react with the corresponding immobilized antibody, radioisotope- or enzyme-labeled anti-biomarker protein antibody is allowed to react with the system, and radioactivity or the enzyme assayed (ELISA-sandwich assay). Other conventional methods can also be employed as suitable.

[0666] The above techniques can be conducted essentially as a “one-step” or “two-step” assay. A “one-step” assay involves contacting antigen with immobilized antibody and, without washing, contacting the mixture with labeled antibody. A “two-step” assay involves washing before contacting, the mixture with labeled antibody. Other conventional methods can also be employed as suitable.

[0667] In one embodiment, a method for measuring biomarker protein levels comprises the steps of: contacting a biological specimen with an antibody or variant (e.g., fragment) thereof which selectively binds the biomarker protein, and detecting whether said antibody or variant thereof is bound to said sample and thereby measuring the levels of the biomarker protein.

[0668] Enzymatic and radiolabeling of biomarker protein and/or the antibodies can be effected by conventional means. Such means will generally include covalent linking of the enzyme to the antigen or the antibody in question, such as by glutaraldehyde, specifically so as not to adversely affect the activity of the enzyme, by which is meant that the enzyme must still be capable of interacting with its substrate, although it is not necessary for all of the enzyme to be active, provided that enough remains active to permit the assay to be effected. Indeed, some techniques for binding enzyme are non-specific (such as using formaldehyde), and will only yield a proportion of active enzyme.

[0669] It is usually desirable to immobilize one component of the assay system on a support, thereby allowing other components of the system to be brought into contact with the component and readily removed without laborious and time-consuming labor. It is possible for a second phase to be immobilized away from the first, but one phase is usually sufficient.

[0670] It is possible to immobilize the enzyme itself on a support, but if solid-phase enzyme is required, then this is generally best achieved by binding to antibody and affixing the antibody to a support, models and systems for which are well-known in the art. Simple polyethylene can provide a suitable support.

[0671] Enzymes employable for labeling are not particularly limited, but can be selected from the members of the oxidase group, for example. These catalyze production of hydrogen peroxide by reaction with their substrates, and glucose oxidase is often used for its good stability, ease of availability and cheapness, as well as the ready availability of its substrate (glucose). Activity of the oxidase can be assayed by measuring the concentration of hydrogen peroxide formed after reaction of the enzyme-labeled antibody with the substrate under controlled conditions well-known in the art.

[0672] Other techniques can be used to detect biomarker protein according to a practitioner's preference based upon the present disclosure. One such technique is Western blotting (Towbin et al. (1979) Proc. Nat. Acad. Sci. U.S.A. 76:4350), wherein a suitably treated sample is run on an SDS-PAGE gel before being transferred to a solid support, such as a nitrocellulose filter. Anti-biomarker protein antibodies (unlabeled) are then brought into contact with the support and assayed by a secondary immunological reagent, such as labeled protein A or anti-immunoglobulin (suitable labels including ¹²⁵I, horseradish peroxidase and alkaline phosphatase). Chromatographic detection can also be used.

[0673] Immunohistochemistry can be used to detect expression of biomarker protein, e.g., in a biopsy sample. A suitable antibody is brought into contact with, for example, a thin layer of cells, washed, and then contacted with a second, labeled antibody. Labeling can be by fluorescent markers, enzymes, such as peroxidase, avidin, or radiolabeling. The assay is scored visually, using microscopy.

[0674] Anti-biomarker protein antibodies, such as intrabodies, can also be used for imaging purposes, for example, to detect the presence of biomarker protein in cells and tissues of a subject. Suitable labels include radioisotopes, iodine (¹²⁵I, ¹²¹I), carbon (¹⁴C), sulphur (³⁵S), tritium (³H), indium (¹¹²In), and technetium (⁹⁹mTc), fluorescent labels, such as fluorescein and rhodamine, and biotin.

[0675] For in vivo imaging purposes, antibodies are not detectable, as such, from outside the body, and so must be labeled, or otherwise modified, to permit detection. Markers for this purpose can be any that do not substantially interfere with the antibody binding, but which allow external detection. Suitable markers can include those that can be detected by X-radiography, NMR or MRI. For X-radiographic techniques, suitable markers include any radioisotope that emits detectable radiation but that is not overtly harmful to the subject, such as barium or cesium, for example. Suitable markers for NMR and MRI generally include those with a detectable characteristic spin, such as deuterium, which can be incorporated into the antibody by suitable labeling of nutrients for the relevant hybridoma, for example.

[0676] The size of the subject, and the imaging system used, will determine the quantity of imaging moiety needed to produce diagnostic images. In the case of a radioisotope moiety, for a human subject, the quantity of radioactivity injected will normally range from about 5 to 20 millicuries of technetium-99. The labeled antibody or antibody fragment will then preferentially accumulate at the location of cells which contain biomarker protein. The labeled antibody or antibody fragment can then be detected using known techniques.

[0677] Antibodies that can be used to detect biomarker protein include any antibody, whether natural or synthetic, full length or a fragment thereof, monoclonal or polyclonal, that binds sufficiently strongly and specifically to the biomarker protein to be detected. An antibody can have a K_{d} of at most about 10⁻⁶M, 10⁻⁷M, 10⁻⁸M, 10⁻⁹M, 10⁻¹⁰M, 10⁻¹¹M, or 10⁻¹²M. The phrase “specifically binds” refers to binding of, for example, an antibody to an epitope or antigen or antigenic determinant in such a manner that binding can be displaced or competed with a second preparation of identical or similar epitope, antigen or antigenic determinant. An antibody can bind preferentially to the biomarker protein relative to other proteins, such as related proteins.

[0678] Antibodies are commercially available or can be prepared according to methods known in the art.

[0679] In some embodiments, agents that specifically bind to a biomarker protein other than antibodies are used, such as peptides. Peptides that specifically bind to a biomarker protein can be identified by any means known in the art. For example, specific peptide binders of a biomarker protein can be screened for using peptide phage display libraries.

[0680] f. Method for Detection of Biomarker Structural Alterations

[0681] The following illustrative methods can be used to identify the presence of a structural alteration in a biomarker nucleic acid and/or biomarker polypeptide molecule in order to, for example, identify sequences or agents that affect T cell mediated killing of cancer cells.

[0682] In certain embodiments, detection of the alteration involves the use of a probe/primer in a polymerase chain reaction (PCR) (see, e.g., U.S. Pat. Nos. 4,683,195 and 4,683,202), such as anchor PCR or RACE PCR, or, alternatively, in a ligation chain reaction (LCR) (see, e.g., Landegran et a. (1988) Science 241:1077-1080; and Nakazawa et al. (1994) Proc. Natl. Acad. Sci. USA. 91:360-364), the latter of which can be particularly useful for detecting point mutations in a biomarker nucleic acid such as a biomarker gene (see Abravaya et al. (1995) Nucl. Acids Res. 23:675-682). This method can include the steps of collecting a sample of cells from a subject, isolating nucleic acid (e.g., genomic, mRNA or both) from the cells of the sample, contacting the nucleic acid sample with one or more primers which specifically hybridize to a biomarker gene under conditions such that hybridization and amplification of the biomarker gene (if present) occurs, and detecting the presence or absence of an amplification product, or detecting the size of the amplification product and comparing the length to a control sample. It is anticipated that PCR and/or LCR can be desirable to use as a preliminary amplification step in conjunction with any of the techniques used for detecting mutations described herein.

[0683] Alternative amplification methods include: self-sustained sequence replication (Guatelli et al. (1990) Proc. Natl. Acad Sci. U.S.A. 87:1874-1878), transcriptional amplification system (Kwoh et al. (1989) Proc. Natl. Acad. Sci. U.S.A. 86:1173-1177), Q-Beta Replicase (Lizardi et al. (1988) Biotechntol. 6:1197), or any other nucleic acid amplification method, followed by the detection of the amplified molecules using techniques well-known to those of skill in the art. These detection schemes are especially useful for the detection of nucleic acid molecules if such molecules are present in very low numbers.

[0684] In an alternative embodiment, mutations in a biomarker nucleic acid from a sample cell can be identified by alterations in restriction enzyme cleavage patterns. For example, sample and control DNA is isolated, amplified (optionally), digested with one or more restriction endonucleases, and fragment length sizes are determined by gel electrophoresis and compared. Differences in fragment length sizes between sample and control DNA indicates mutations in the sample DNA. Moreover, the use of sequence specific ribozymes (see, for example, U.S. Pat. No. 5,498,531) can be used to score for the presence of specific mutations by development or loss of a ribozyme cleavage site.

[0685] In other embodiments, genetic mutations in biomarker nucleic acid can be identified by hybridizing a sample and control nucleic acids, e.g., DNA or RNA, to high density arrays containing hundreds or thousands of oligonucleotide probes (Cronin et al. (1996) Hum. Autat. 7:244-255, Kozal et al. (1996) Nat. Med 2:753-759). For example, biomarker genetic mutations can be identified in two dimensional arrays containing light-generated DNA probes as described in Cronin et al. (1996) supra. Briefly, a first hybridization array of probes can be used to scan through long stretches of DNA in a sample and control to identify base changes between the sequences by making linear arrays of sequential, overlapping probes. This step allows the identification of point mutations. This step is followed by a second hybridization array that allows the characterization of specific mutations by using smaller, specialized probe arrays complementary to all variants or mutations detected. Each mutation array is composed of parallel probe sets, one complementary to the wild-type gene and the other complementary to the mutant gene. Such biomarker genetic mutations can be identified in a variety of contexts, including, for example, germline and somatic mutations.

[0686] In yet another embodiment, any of a variety of sequencing reactions known in the art can be used to directly sequence a biomarker gene and detect mutations by comparing the sequence of the sample biomarker with the corresponding wild-type (control) sequence. Examples of sequencing reactions include those based on techniques developed by Maxam and Gilbert (1977) Proc. Natl. Acad. Sci. U.S.A. 74:560 or Sanger (1977) Proc. Natl. Acad Sci. U.S.A. 74:5463. It is also contemplated that any of a variety of automated sequencing procedures can be utilized when performing the diagnostic assays (Naeve (1995) Biotechniques 19:448-53), including sequencing by mass spectrometry (see, e.g., PCT Publ. No. WO 94/16101; Cohen et al. (1996) Adv. Chromatogr. 36:127-162; and Griffin et al. (1993)Appl. Biochem. Biotechnol. 38:147-159).

[0687] Other methods for detecting mutations in a biomarker gene include methods in which protection from cleavage agents is used to detect mismatched bases in RNA/RNA or RNA/DNA heteroduplexes (Myers et al. (1985) Science 230:1242). In general, the art technique of “mismatch cleavage” starts by providing heteroduplexes formed by hybridizing (labeled) RNA or DNA containing the wild-type biomarker sequence with potentially mutant RNA or DNA obtained from a tissue sample. The double-stranded duplexes are treated with an agent which cleaves single-stranded regions of the duplex such as which will exist due to base pair mismatches between the control and sample strands. For instance, RNA/DNA duplexes can be treated with RNase and DNA/DNA hybrids treated with SI nuclease to enzymatically digest the mismatched regions. In other embodiments, either DNA/DNA or RNA/DNA duplexes can be treated with hydroxylamine or osmium tetroxide and with piperidine in order to digest mismatched regions. After digestion of the mismatched regions, the resulting material is then separated by size on denaturing polyacrylamide gels to determine the site of mutation. See, for example, Cotton et al. (1988) Proc. Natl. Acad. Sci. U.S.A. 85:4397 and Saleeba et al. (1992) Methods Enzymol. 217:286-295. In a preferred embodiment, the control DNA or RNA can be labeled for detection.

[0688] In still another embodiment, the mismatch cleavage reaction employs one or more proteins that recognize mismatched base pairs in double-stranded DNA (so called “DNA mismatch repair” enzymes) in defined systems for detecting and mapping point mutations in biomarker cDNAs obtained from samples of cells. For example, the mutY enzyme of E. coli cleaves A at G/A mismatches and the thymidine DNA glycosylase from HeLa cells cleaves T at G/T mismatches (Hsu et al. (1994) Carcinogenesis 15:1657-1662). According to an exemplary embodiment, a probe based on a biomarker sequence, e.g., a wild-type biomarker treated with a DNA mismatch repair enzyme, and the cleavage products, if any, can be detected from electrophoresis protocols or the like (e.g., U.S. Pat. No. 5,459,039).

[0689] In other embodiments, alterations in electrophoretic mobility can be used to identify mutations in biomarker genes. For example, single strand conformation polymorphism (SSCP) can be used to detect differences in electrophoretic mobility between mutant and wild type nucleic acids (Orita et al. (1989) Proc Natl. Acad. Sci U.S.A. 86:2766; Cotton (1993) Mutat. Res. 285:125-144; Hayashi (1992) Genet. Anal. Tech. Appl. 9:73-79). Single-stranded DNA fragments of sample and control biomarker nucleic acids will be denatured and allowed to renature. The secondary structure of single-stranded nucleic acids varies according to sequence, the resulting alteration in electrophoretic mobility enables the detection of even a single base change. The DNA fragments can be labeled or detected with labeled probes. The sensitivity of the assay can be enhanced by using RNA (rather than DNA), in which the secondary structure is more sensitive to a change in sequence. In a preferred embodiment, the subject method utilizes heteroduplex analysis to separate double stranded heteroduplex molecules on the basis of changes in electrophoretic mobility (Keen et al. (1991) Trends Genet. 7:5).

[0690] In yet another embodiment the movement of mutant or wild-type fragments in polyacrylamide gels containing a gradient of denaturant is assayed using denaturing gradient gel electrophoresis (DGGE) (Myers et al. (1985) Nature 313:495). When DGGE is used as the method of analysis, DNA will be modified to ensure that it does not completely denature, for example by adding a GC clamp of approximately 40 bp of high-melting GC-rich DNA by PCR. In a further embodiment, a temperature gradient is used in place of a denaturing gradient to identify differences in the mobility of control and sample DNA (Rosenbaum and Reissner (1987) Biophys. Chem. 265:12753).

[0691] Examples of other techniques for detecting point mutations include, but are not limited to, selective oligonucleotide hybridization, selective amplification, or selective primer extension. For example, oligonucleotide primers can be prepared in which the known mutation is placed centrally and then hybridized to target DNA under conditions which permit hybridization only if a perfect match is found (Saiki et al. (1986) Nature 324:163; Saiki et al. (1989) Proc. Natl. Acad. Sci. U.S.A. 86:6230). Such allele specific oligonucleotides are hybridized to PCR amplified target DNA or a number of different mutations when the oligonucleotides are attached to the hybridizing membrane and hybridized with labeled target DNA.

[0692] Alternatively, allele specific amplification technology which depends on selective PCR amplification can be used in conjunction with the instant invention. Oligonucleotides used as primers for specific amplification can carry the mutation of interest in the center of the molecule (so that amplification depends on differential hybridization) (Gibbs et al. (1989) Nucleic Acids Res. 17:2437-2448) or at the extreme 3′ end of one primer where, under appropriate conditions, mismatch can prevent, or reduce polymerase extension (Prossner (1993) Tibtech 11:238). In addition it can be desirable to introduce a novel restriction site in the region of the mutation to create cleavage-based detection (Gasparini et al. (1992) Mol. Cell Probes 6:1). It is anticipated that in certain embodiments amplification can also be performed using Taq ligase for amplification (Barany (1991) Proc. Natl. Acad. Sci U.S.A. 88:189). In such cases, ligation will occur only if there is a perfect match at the 3′ end of the 5′ sequence making it possible to detect the presence of a known mutation at a specific site by looking for the presence or absence of amplification.

### VI. Compositions, Including Formulations and Pharmaceutical Compositions

[0693] Compositions comprising agents encompassed by the present invention are contemplated without limitation. For example, nucleic acid-based compositions (e.g., messenger RNA (mRNA), cDNA, siRNA, antisense nucleic acids, oligonucleotides, ribozymes, DNAzymes, aptamers, nucleic acid decoys, nucleic acid chimeras, triple helical structures, etc.), protein-based compositions, cell-based componsitions, as well as variants, modifications, and engineered versions thereof, are contemplated for use in the methods described herein as well as compositions per se. In some embodiments, siRNA molecules having a sense strande nucleic acid sequence and an antisense strand nucleic acid sequence, each selected from sequences described herein, as well as sequence variant and/or chemically modified versions thereof, are encompassed by the present invention and are described in detail above. In some embodiments, cells modified as described herein, such as monocytes and/or macrophages having a modulated inflammatory phenotype.

[0694] Such compositions can be comprised within pharmaceutical compositions and/or formulations. Such compositions can be prepared by any method known or hereafter developed in the art of pharmacology. In general, such preparatory methods include the step of bringing the agent, such as an active ingredient, into association with an excipient and/or one or more other accessory ingredients, and then, if necessary and/or desirable, dividing, shaping and/or packaging the product into a desired single- or multi-dose unit. As used herein, the term “active ingredient” refers to any chemical and biological substance that has a physiological effect in human or in animals, when exposed to it. In the context encompassed by the present invention, the active ingredient in the formulations can be any of the agents that modulate a biomarker encompassed by the present invention (e.g., at least one target listed in Table 1 and/or Table 2).

### 1. Composition Preparation

[0695] A composition in accordance with the invention can be prepared, packaged, and/or sold in bulk, as a single unit dose, and/or as a plurality of single unit doses. As used herein, a “unit dose” is discrete amount of the pharmaceutical composition comprising a pre-determined amount of the active ingredient. The amount of the active ingredient is generally equal to the dosage of the active ingredient which would be administered to a subject and/or a convenient fraction of such a dosage such as, for example, one-half or one-third of such a dosage.

[0696] The term “pharmaceutically acceptable” refers to those agents, materials, compositions, and/or dosage forms which are, within the scope of sound medical judgment, suitable for use in contact with the tissues of human beings and animals without excessive toxicity, irritation, allergic response, or other problem or complication, commensurate with a reasonable benefit/risk ratio.

[0697] Pharmaceutical compositions encompassed by the present invention can be presented as anhydrous pharmaceutical formulations and dosage forms, liquid pharmaceutical formulations, solid pharmaceutical formulations, vaccines, and the like. Suitable liquid preparations can include, but are not limited to, isotonic aqueous solutions, suspensions, emulsions, or viscous compositions that are buffered to a selected pH.

[0698] As described in detail below, the agents and other compositions encompassed by the present invention can be specially formulated for administration in solid or liquid form, including those adapted for various routes of administration, such as (1) oral administration, for example, drenches (aqueous or non-aqueous solutions or suspensions), tablets, boluses, powders, granules, pastes; (2) parenteral administration, for example, by subcutaneous, intramuscular or intravenous injection as, for example, a sterile solution or suspension; (3) topical application, for example, as a cream, ointment or spray applied to the skin; (4) intravaginally or intrarectally, for example, as a pessary, cream or foam; or (5) aerosol, for example, as an aqueous aerosol, liposomal preparation or solid particles containing the compound. Any appropriate form factor for an agent or composition described herein, such as, but not limited to, tablets, capsules, liquid syrups, soft gels, suppositories, and enemas, is contemplated.

[0699] Pharmaceutical compositions encompassed by the present invention can be presented as discrete dosage forms, such as capsules, sachets, or tablets, or liquids or aerosol sprays each containing a pre-determined amount of an active ingredient as a powder or in granules, a solution, or a suspension in an aqueous or non-aqueous liquid, an oil-in-water emulsion, a water-in-oil liquid emulsion, powders for reconstitution, powders for oral consumptions, bottles (including powders or liquids in a bottle), orally dissolving films, lozenges, pastes, tubes, gums, and packs. Such dosage forms can be prepared by any of the methods of pharmacy.

[0700] A tablet can be made by compression or molding, optionally with one or more accessory ingredients. Compressed tablets can be prepared using binder (for example, gelatin or hydroxypropylmethyl cellulose), lubricant, inert diluent, preservative, disintegrant (for example, sodium starch glycolate or cross-linked sodium carboxymethyl cellulose), surface-active or dispersing agent. Molded tablets can be made by molding in a suitable machine a mixture of the powdered peptide or peptidomimetic moistened with an inert liquid diluent.

[0701] Tablets, and other solid dosage forms, such as dragees, capsules, pills and granules, can optionally be scored or prepared with coatings and shells, such as enteric coatings and other coatings well-known in the pharmaceutical-formulating art. They can also be formulated so as to provide slow or controlled release of the active ingredient therein using, for example, hydroxypropylmethyl cellulose in varying proportions to provide the desired release profile, other polymer matrices, liposomes and/or microspheres. They can be sterilized by, for example, filtration through a bacteria-retaining filter, or by incorporating sterilizing agents in the form of sterile solid compositions, which can be dissolved in sterile water, or some other sterile injectable medium immediately before use. These compositions can also optionally contain opacifying agents and can be of a composition that they release the active ingredient(s) only, or preferentially, in a certain portion of the gastrointestinal tract, optionally, in a delayed manner. Examples of embedding compositions, which can be used include polymeric substances and waxes. The active ingredient can also be in micro-encapsulated form, if appropriate, with one or more excipients.

[0702] In solid dosage forms for oral administration (capsules, tablets, pills, dragees, powders, granules and the like), the active ingredient is mixed with one or more pharmaceutically-acceptable carriers, such as sodium citrate or dicalcium phosphate, and/or any of the following: (1) fillers or extenders, such as starches, lactose, sucrose, glucose, mannitol, and/or silicic acid; (2) binders, such as, for example, carboxymethylcellulose, alginates, gelatin, polyvinyl pyrrolidone, sucrose and/or acacia; (3) humectants, such as glycerol; (4) disintegrating agents, such as agar-agar, calcium carbonate, potato or tapioca starch, alginic acid, certain silicates, and sodium carbonate; (5) solution retarding agents, such as paraffin; (6) absorption accelerators, such as quaternary ammonium compounds; (7) wetting agents, such as, for example, acetyl alcohol and glycerol monostearate; (8) absorbents, such as kaolin and bentonite clay; (9) lubricants, such a talc, calcium stearate, magnesium stearate, solid polyethylene glycols, sodium lauryl sulfate, and mixtures thereof; and (10) coloring agents. In the case of capsules, tablets and pills, the pharmaceutical compositions can also comprise buffering agents. Solid compositions of a similar type can also be employed as fillers in soft and hard-filled gelatin capsules using such excipients as lactose or milk sugars, as well as high molecular weight polyethylene glycols and the like.

[0703] Liquid dosage forms for oral administration include pharmaceutically acceptable emulsions, microemulsions, solutions, suspensions, syrups and elixirs. In addition to the active ingredient, the liquid dosage forms can contain inert diluents commonly used in the art, such as, for example, water or other solvents, solubilizing agents and emulsifiers, such as ethyl alcohol, isopropyl alcohol, ethyl carbonate, ethyl acetate, benzyl alcohol, benzyl benzoate, propylene glycol, 1,3-butylene glycol, oils (in particular, cottonseed, groundnut, corn, germ, olive, castor and sesame oils), glycerol, tetrahydrofuryl alcohol, polyethylene glycols and fatty acid esters of sorbitan, and mixtures thereof. Besides inert diluents, the oral compositions can also include adjuvants such as wetting agents, emulsifying and suspending agents, sweetening, flavoring, coloring, perfuming and preservative agents. Suspensions, in addition to the active agent can contain suspending agents as, for example, ethoxylated isostearyl alcohols, polyoxyethylene sorbitol and sorbitan esters, microcrystalline cellulose, aluminum metahydroxide, bentonite, agar-agar and tragacanth, and mixtures thereof.

[0704] Formulations for rectal or vaginal administration can be presented as a suppository, which can be prepared by mixing one or more agents with one or more suitable nonirritating excipients or carriers comprising, for example, cocoa butter, polyethylene glycol, a suppository wax or a salicylate, and which is solid at room temperature, but liquid at body temperature and, therefore, will melt in the rectum or vaginal cavity and release the active agent.

[0705] Formulations which are suitable for vaginal administration also include pessaries, tampons, creams, gels, pastes, foams or spray formulations containing such carriers as are known in the art to be appropriate.

[0706] Dosage forms for the topical or transdermal administration of an agent that modulates (e.g., inhibits) biomarker expression and/or activity include powders, sprays, ointments, pastes, creams, lotions, gels, solutions, patches and inhalants. The active component can be mixed under sterile conditions with a pharmaceutically-acceptable carrier, and with any preservatives, buffers, or propellants which can be required.

[0707] The ointments, pastes, creams and gels can contain, in addition to an agent, excipients, such as animal and vegetable fats, oils, waxes, paraffins, starch, tragacanth, cellulose derivatives, polyethylene glycols, silicones, bentonites, silicic acid, talc and zinc oxide, or mixtures thereof.

[0708] Powders and sprays can contain, in addition to an agent that modulates (e.g., inhibits) biomarker expression and/or activity, excipients such as lactose, talc, silicic acid, aluminum hydroxide, calcium silicates and polyamide powder, or mixtures of these substances. Sprays can additionally contain customary propellants, such as chlorofluorohydrocarbons and volatile unsubstituted hydrocarbons, such as butane and propane.

[0709] Agent can be administered by aerosol. This is accomplished by preparing an aqueous aerosol, liposomal preparation or solid particles containing the compound. A nonaqueous (e.g., fluorocarbon propellant) suspension could be used. Sonic nebulizers are preferred because they minimize exposing the agent to shear, which can result in degradation of the compound.

[0710] Ordinarily, an aqueous aerosol is made by formulating an aqueous solution or suspension of the agent together with conventional pharmaceutically acceptable carriers and stabilizers. The carriers and stabilizers vary with the requirements of the particular compound, but typically include nonionic surfactants (Tweens, Pluronics, or polyethylene glycol), innocuous proteins like serum albumin, sorbitan esters, oleic acid, lecithin, amino acids such as glycine, buffers, salts, sugars or sugar alcohols. Aerosols generally are prepared from isotonic solutions.

[0711] Transdermal patches have the added advantage of providing controlled delivery of an agent to the body. Such dosage forms can be made by dissolving or dispersing the agent in the proper medium. Absorption enhancers can also be used to increase the flux of the peptidomimetic across the skin. The rate of such flux can be controlled by either providing a rate controlling membrane or dispersing the peptidomimetic in a polymer matrix or gel.

[0712] Ophthalmic formulations, eye ointments, powders, solutions and the like, are also contemplated as being within the scope of this invention.

[0713] In some embodiments, pharmaceutical compositions encompassed by the present invention are formulated in parenteral dosage forms. The parenteral formulations can be aqueous solutions containing carriers or excipients such as salts, carbohydrates and buffering agents (e.g., at a pH of from 3 to 9), or sterile non-aqueous solutions, or dried forms which can be used in conjunction with a suitable vehicle such as sterile, pyrogen-free water. For example, an aqueous solution of the therapeutic agents encompassed by the present invention comprises an isotonic saline, 5% glucose or other pharmaceutically acceptable liquid carriers such as liquid alcohols, glycols, esters, and amides, for example, as disclosed in U.S. Pat. No. 7,910,594. In another example, an aqueous solution of the therapeutic agents encompassed by the present invention comprises a phosphate buffered formulation (pH 7.4) for intravenous administration as disclosed in PCT Publ. No. WO 2011/014821. The parenteral dosage form can be in the form of a reconstitutable lyophilizate comprising the dose of the therapeutic agents encompassed by the present invention. Any prolonged release dosage forms known in the art can be utilized such as, for example, the biodegradable carbohydrate matrices described in U.S. Pat. Nos. 4,713,249, 5,266,333; and 5,417,982, or, alternatively, a slow pump (e.g., an osmotic pump) can be used. The preparation of parenteral formulations under sterile conditions, for example, by lyophilization under sterile conditions, can readily be accomplished using standard pharmaceutical techniques well-known to those skilled in the art. The solubility of a therapeutic agent encompassed by the present invention used in the preparation of a parenteral formulation can be increased by the use of appropriate formulation techniques, such as the incorporation of solubility-enhancing agents. Formulations for parenteral administration can comprise one or more agents in combination with one or more pharmaceutically-acceptable sterile isotonic aqueous or nonaqueous solutions, dispersions, suspensions or emulsions, or sterile powders which can be reconstituted into sterile injectable solutions or dispersions just prior to use, which can contain antioxidants, buffers, bacteriostats, solutes which render the formulation isotonic with the blood of the intended recipient or suspending or thickening agents.

[0714] These compositions can also contain adjuvants such as preservatives, wetting agents, emulsifying agents and dispersing agents. Prevention of the action of microorganisms can be ensured by the inclusion of various antibacterial and antifungal agents, for example, paraben, chlorobutanol, phenol sorbic acid, and the like. It can also be desirable to include isotonic agents, such as sugars, sodium chloride, and the like into the compositions. In addition, prolonged absorption of the injectable pharmaceutical form can be brought about by the inclusion of agents which delay absorption such as aluminum monostearate and gelatin.

[0715] In some cases, in order to prolong the effect of a drug, it is desirable to slow the absorption of the drug from subcutaneous or intramuscular injection. This can be accomplished by the use of a liquid suspension of crystalline or amorphous material having poor water solubility. The rate of absorption of the drug then depends upon its rate of dissolution, which, in turn, can depend upon crystal size and crystalline form. Alternatively, delayed absorption of a parenterally-administered drug form is accomplished by dissolving or suspending the drug in an oil vehicle.

[0716] Injectable depot forms are made by forming microencapsule matrices of an agent that modulates (e.g., inhibits) biomarker expression and/or activity, in biodegradable polymers such as polylactide-polyglycolide. Depending on the ratio of drug to polymer, and the nature of the particular polymer employed, the rate of drug release can be controlled. Examples of other biodegradable polymers include poly(orthoesters) and poly(anhydrides). Depot injectable formulations are also prepared by entrapping the drug in liposomes or microemulsions, which are compatible with body tissue.

[0717] When the agents encompassed by the present invention are administered as pharmaceuticals, to humans and animals, they can be given per se or as a pharmaceutical composition containing, for example, 0.1 to 99.5% (more preferably, 0.5 to 90%) of active ingredient in combination with a pharmaceutically acceptable carrier.

[0718] Actual dosage levels of the active ingredients in the pharmaceutical compositions of this invention can be determined by the methods encompassed by the present invention so as to obtain an amount of the active ingredient, which is effective to achieve the desired therapeutic response for a particular subject, composition, and mode of administration, without being toxic to the subject.

[0719] In some embodiments, pharmaceutical compositions encompassed by the present invention can be formulated for controlled release and/or targeted delivery. As used herein, “controlled release” refers to a pharmaceutical composition or compound release profile that conforms to a particular pattern of release to effect a therapeutic outcome. In one embodiment, the compositions encompassed by the present invention can be encapsulated into a delivery agent described herein and/or known in the art for controlled release and/or targeted delivery. As used herein, the term “encapsulate” means to enclose, surround or encase. As it relates to the formulation encompassed by the present invention, encapsulation can be substantial, complete or partial. The term “substantially encapsulated” means that at least greater than 50, 60, 70, 80, 85, 90, 95, 96, 97, 98, 99, 99.9, 99.9 or greater than 99.999% of a therapeutic agent encompassed by the present invention can be enclosed, surrounded or encased within the particle. The term “partially encapsulation” means that less than 10, 10, 20, 30, 40 50 or less of the conjugate encompassed by the present invention can be enclosed, surrounded or encased within the particle. For example, at least 1, 5, 10, 20, 30, 40, 50, 60, 70, 80, 85, 90, 95, 96, 97, 98, 99, 99.9, 99.99 or greater than 99.99% of the pharmaceutical composition or compound encompassed by the present invention are encapsulated in the formulation.

[0720] In some embodiments, such formulations can also be constructed or compositions altered such that they passively or actively are directed to different cell types in vivo, including but not limited to monocytes, macrophages, and other immune cells (e.g., dendritic cells, antigen presenting cells, T lymphocytes, B lymphocytes, and natural killer cells), cancer cells and the like. Formulations can also be selectively targeted through expression of different ligands on their surface as exemplified by, but not limited by, folate, transferrin, N-acetylgalactosamine (GalNAc), and antibody targeted approaches.

[0721] 2. Excipients

[0722] The pharmaceutical compositions encompassed by the present invention can be formulated using one or more excipients to: (1) increase stability; (2) permit the sustained or delayed release (e.g., from a depot formulation); (3) alter the biodistribution (e.g., target an agent to a specific tissue or cell type); (4) alter the release profile of the agent in vivo. Non-limiting examples of the excipients include any and all solvents, dispersion media, diluents, or other liquid vehicles, dispersion or suspension aids, surface active agents, isotonic agents, thickening or emulsifying agents, and preservatives. Excipients encompassed by the present invention can also include, without limitation, lipidoids, liposomes, lipid nanoparticles, polymers, lipoplexes, core-shell nanoparticles, peptides, proteins, hyaluronidase, nanoparticle mimics and combinations thereof.

[0723] The term “pharmaceutically acceptable carrier” or “pharmaceutically acceptable excipient” is intended to include any and all solvents, dispersion media, diluents or other liquid vehicles, dispersion or suspension agents, surface active agents, isotonic agents, thickening or emulsifying agents, disintegrating agents, preservatives, buffering agents, solid binders, lubricants, oils, coatings, antibacterial and antifungal agents, absorption delaying agents, and the like, as suited to the particular dosage form desired. Remington's The Science and Practice of Pharmacy, 21st Edition, A. R. Gennaro (Lippincott, Williams & Wilkins, Baltimore, Md., 2006) discloses various excipients used in formulating pharmaceutical compositions and known techniques for the preparation thereof. Except insofar as any conventional excipient medium is incompatible with a substance or its derivatives, such as by producing any undesirable biological effect or otherwise interacting in a deleterious manner with any other component(s) of the pharmaceutical composition, its use is contemplated to be within the scope of this invention. Supplementary active ingredients can also be incorporated into the described compositions.

[0724] In some embodiments, a pharmaceutically acceptable excipient is at least 95%, at least 96%, at least 97%, at least 98%, at least 99%, at least 99.5%, or at least 99.9% or 100% pure. In some embodiments, an excipient is approved for use in humans and for veterinary use. In some embodiments, an excipient is approved by United States Food and Drug Administration. In some embodiments, an excipient is pharmaceutical grade. In some embodiments, an excipient meets the standards of the United States Pharmacopoeia (USP), the European Pharmacopoeia (EP), the British Pharmacopoeia, and/or the International Pharmacopoeia.

[0725] Exemplary diluents include, but are not limited to, calcium carbonate, sodium carbonate, calcium phosphate, dicalcium phosphate, calcium sulfate, calcium hydrogen phosphate, sodium phosphate lactose, sucrose, cellulose, microcrystalline cellulose, kaolin, mannitol, sorbitol, inositol, sodium chloride, dry starch, cornstarch, powdered sugar, etc., and/or combinations thereof.

[0726] Exemplary granulating and/or dispersing agents include, but are not limited to, potato starch, corn starch, tapioca starch, sodium starch glycolate, clays, alginic acid, guar gum, citrus pulp, agar, bentonite, cellulose and wood products, natural sponge, cation-exchange resins, calcium carbonate, silicates, sodium carbonate, cross-linked poly(vinyl-pyrrolidone) (crospovidone), sodium carboxymethyl starch (sodium starch glycolate), carboxymethyl cellulose, cross-linked sodium carboxymethyl cellulose (croscarmellose), methylcellulose, pregelatinized starch (starch 1500), microcrystalline starch, water insoluble starch, calcium carboxymethyl cellulose, magnesium aluminum silicate (VEEGUM®), sodium lauryl sulfate, quaternary ammonium compounds, etc., and/or combinations thereof.

[0727] Exemplary surface active agents and/or emulsifiers include, but are not limited to, natural emulsifiers (e.g., acacia, agar, alginic acid, sodium alginate, tragacanth, chondrux, cholesterol, xanthan, pectin, gelatin, egg yolk, casein, wool fat, cholesterol, wax, and lecithin), colloidal clays (e.g., bentonite [aluminum silicate] and VEEGUM® [magnesium aluminum silicate]), long chain amino acid derivatives, high molecular weight alcohols (e.g., stearyl alcohol, cetyl alcohol, oleyl alcohol, triacetin monostearate, ethylene glycol distearate, glyceryl monostearate, and propylene glycol monostearate, polyvinyl alcohol), carbomers (e.g., carboxy polymethylene, polyacrylic acid, acrylic acid polymer, and carboxyvinyl polymer), carrageenan, cellulosic derivatives (e.g., carboxymethylcellulose sodium, powdered cellulose, hydroxymethyl cellulose, hydroxypropyl cellulose, hydroxypropyl methylcellulose, methylcellulose), sorbitan fatty acid esters (e.g., polyoxyethylene sorbitan monolaurate [TWEEN®20], polyoxyethylene sorbitan [TWEENn®60], polyoxyethylene sorbitan monooleate [TWEEN®80], sorbitan monopalmitate [SPAN®40], sorbitan monostearate [SPAN®60], sorbitan tristearate [SPAN®65], glyceryl monooleate, sorbitan monooleate [SPAN®80]), polyoxyethylene esters (e.g., polyoxyethylene monostearate [MYRJ®45], polyoxyethylene hydrogenated castor oil, polyethoxylated castor oil, polyoxymethylene stearate, and SOLUTOL®), sucrose fatty acid esters, polyethylene glycol fatty acid esters (e.g., CREMOPHOR®), polyoxyethylene ethers, (e.g., polyoxyethylene lauryl ether [BRIJ®30]), poly(vinyl-pyrrolidone), diethylene glycol monolaurate, triethanolamine oleate, sodium oleate, potassium oleate, ethyl oleate, oleic acid, ethyl laurate, sodium lauryl sulfate, PLUORINC® F 68, POLOXAMER®188, cetrimonium bromide, cetylpyridinium chloride, benzalkonium chloride, docusate sodium, etc. and/or combinations thereof.

[0728] Exemplary binding agents include, but are not limited to, starch (e.g., cornstarch and starch paste); gelatin; sugars (e.g., sucrose, glucose, dextrose, dextrin, molasses, lactose, lactitol, mannitol,); natural and synthetic gums (e.g., acacia, sodium alginate, extract of Irish moss, panwar gum, ghatti gum, mucilage of isapol husks, carboxymethylcellulose, methylcellulose, ethylcellulose, hydroxyethylcellulose, hydroxypropyl cellulose, hydroxypropyl methylcellulose, microcrystalline cellulose, cellulose acetate, poly(vinyl-pyrrolidone), magnesium aluminum silicate (Veegum®), and larch arabogalactan); alginates; polyethylene oxide; polyethylene glycol; inorganic calcium salts; silicic acid; polymethacrylates; waxes; water; alcohol, etc.; and combinations thereof.

[0729] Exemplary preservatives can include, but are not limited to, antioxidants, chelating agents, antimicrobial preservatives, antifungal preservatives, alcohol preservatives, acidic preservatives, and/or other preservatives. Exemplary antioxidants include, but are not limited to, alpha tocopherol, ascorbic acid, acorbyl palmitate, butylated hydroxyanisole, butylated hydroxytoluene, monothioglycerol, potassium metabisulfite, propionic acid, propyl gallate, sodium ascorbate, sodium bisulfite, sodium metabisulfite, and/or sodium sulfite. Exemplary chelating agents include ethylenediaminetetraacetic acid (EDTA), citric acid monohydrate, disodium edetate, dipotassium edetate, edetic acid, fumaric acid, malic acid, phosphoric acid, sodium edetate, tartaric acid, and/or trisodium edetate. Exemplary antimicrobial preservatives include, but are not limited to, benzalkonium chloride, benzethonium chloride, benzyl alcohol, bronopol, cetrimide, cetylpyridinium chloride, chlorhexidine, chlorobutanol, chlorocresol, chloroxylenol, cresol, ethyl alcohol, glycerin, hexetidine, imidurea, phenol, phenoxyethanol, phenylethyl alcohol, phenylmercuric nitrate, propylene glycol, and/or thimerosal. Exemplary antifungal preservatives include, but are not limited to, butyl paraben, methyl paraben, ethyl paraben, propyl paraben, benzoic acid, hydroxybenzoic acid, potassium benzoate, potassium sorbate, sodium benzoate, sodium propionate, and/or sorbic acid. Exemplary alcohol preservatives include, but are not limited to, ethanol, polyethylene glycol, phenol, phenolic compounds, bisphenol, chlorobutanol, hydroxybenzoate, and/or phenylethyl alcohol. Exemplary acidic preservatives include, but are not limited to, vitamin A, vitamin C, vitamin E, beta-carotene, citric acid, acetic acid, dehydroacetic acid, ascorbic acid, sorbic acid, and/or phytic acid. Other preservatives include, but are not limited to, tocopherol, tocopherol acetate, deteroxime mesylate, cetrimide, butylated hydroxyanisol (BHA), butylated hydroxytoluened (BHT), ethylenediamine, sodium lauryl sulfate (SLS), sodium lauryl ether sulfate (SLES), sodium bisulfite, sodium metabisulfite, potassium sulfite, potassium metabisulfite, GLYDANT PLUS®, PHENONIP, methylparaben, GERMALL®115, GERMABEN® II, NEOLONE™, KATHON™, and/or EUXYL®.

[0730] Exemplary buffering agents include, but are not limited to, citrate buffer solutions, acetate buffer solutions, phosphate buffer solutions, ammonium chloride, calcium carbonate, calcium chloride, calcium citrate, calcium glubionate, calcium gluceptate, calcium gluconate, D-gluconic acid, calcium glycerophosphate, calcium lactate, propanoic acid, calcium levulinate, pentanoic acid, dibasic calcium phosphate, phosphoric acid, tribasic calcium phosphate, calcium hydroxide phosphate, potassium acetate, potassium chloride, potassium gluconate, potassium mixtures, dibasic potassium phosphate, monobasic potassium phosphate, potassium phosphate mixtures, sodium acetate, sodium bicarbonate, sodium chloride, sodium citrate, sodium lactate, dibasic sodium phosphate, monobasic sodium phosphate, sodium phosphate mixtures, tromethamine, magnesium hydroxide, aluminum hydroxide, alginic acid, pyrogen-free water, isotonic saline, Ringer's solution, ethyl alcohol, etc., and/or combinations thereof.

[0731] Exemplary lubricating agents include, but are not limited to, magnesium stearate, calcium stearate, stearic acid, silica, talc, malt, glyceryl behanate, hydrogenated vegetable oils, polyethylene glycol, sodium benzoate, sodium acetate, sodium chloride, leucine, magnesium lauryl sulfate, sodium lauryl sulfate, etc., and combinations thereof.

[0732] Exemplary oils include, but are not limited to, almond, apricot kernel, avocado, babassu, bergamot, black current seed, borage, cade, camomile, canola, caraway, carnauba, castor, cinnamon, cocoa butter, coconut, cod liver, coffee, corn, cotton seed, emu, eucalyptus, evening primrose, fish, flaxseed, geraniol, gourd, grape seed, hazel nut, hyssop, isopropyl myristate, jojoba, kukui nut, lavandin, lavender, lemon, litsea cubeba, macademia nut, mallow, mango seed, meadowfoam seed, mink, nutmeg, olive, orange, orange roughy, palm, palm kernel, peach kernel, peanut, poppy seed, pumpkin seed, rapeseed, rice bran, rosemary, safflower, sandalwood, sasquana, savoury, sea buckthorn, sesame, shea butter, silicone, soybean, sunflower, tea tree, thistle, tsubaki, vetiver, walnut, and wheat germ oils. Exemplary oils include, but are not limited to, butyl stearate, caprylic triglyceride, capric triglyceride, cyclomethicone, diethyl sebacate, dimethicone 360, isopropyl myristate, mineral oil, octyldodecanol, oleyl alcohol, silicone oil, and/or combinations thereof.

[0733] Excipients such as cocoa butter and suppository waxes, coloring agents, coating agents, sweetening, flavoring, and/or perfuming agents can be present in the composition, according to the judgment of the formulator.

[0734] Pharmaceutical formulations can also comprise pharmaceutically acceptable salts. The term “pharmaceutically acceptable salt” refers to salts derived from a variety of organic and inorganic counter ions known in the art (see, e.g., Berge et al. (1977) J. Pharm. Sci. 66:1-19). These salts can be prepared in situ during the final isolation and purification of the agents, or by separately reacting a purified agent in its free base form with a suitable organic or inorganic acid, and isolating the salt thus formed. Pharmaceutically acceptable acid addition salts can be formed with inorganic acids and organic acids. Inorganic acids from which salts can be derived include, for example, hydrochloric acid, hydrobromic acid, sulfuric acid, nitric acid and phosphoric acid. Organic acids from which salts can be derived include, for example, acetic acid, propionic acid, glycolic acid, pyruvic acid, oxalic acid, maleic acid, malonic acid, succinic acid, fumaric acid, tartaric acid, citric acid, benzoic acid, cinnamic acid, mandelic acid, methanesulfonic acid, ethanesulfonic acid, p-toluenesulfonic acid and salicylic acid. Pharmaceutically acceptable base addition salts can be formed with inorganic and organic bases. Inorganic bases from which salts can be derived include, for example, sodium, potassium, lithium, ammonium, calcium, magnesium, iron, zinc, copper, manganese and aluminum. Organic bases from which salts can be derived include, for example, primary, secondary, and tertiary amines, substituted amines including naturally occurring substituted amines, cyclic amines and basic ion exchange resins. Specific examples include isopropylamine, trimethylamine, diethylamine, triethylamine, tripropylamine, and ethanolamine. In some embodiments, the pharmaceutically acceptable base addition salt is chosen from ammonium, potassium, sodium, calcium, and magnesium salts.

[0735] In some embodiments, agents encompassed by the present invention can contain one or more acidic functional groups and, thus, are capable of forming pharmaceutically-acceptable salts with pharmaceutically-acceptable bases. The term “pharmaceutically-acceptable salts” in these instances refers to the relatively non-toxic, inorganic and organic base addition salts of agents that modulates (e.g., inhibits) biomarker expression. These salts can likewise be prepared in situ during the final isolation and purification of the agents, or by separately reacting the purified agent in its free acid form with a suitable base, such as the hydroxide, carbonate or bicarbonate of a pharmaceutically-acceptable metal cation, with ammonia, or with a pharmaceutically-acceptable organic primary, secondary or tertiary amine. Representative alkali or alkaline earth salts include the lithium, sodium, potassium, calcium, magnesium, and aluminum salts and the like. Representative organic amines useful for the formation of base addition salts include ethylamine, diethylamine, ethylenediamine, ethanolamine, diethanolamine, piperazine and the like (see, for example, Berge et al., supra).

[0736] The term “co-crystal” refers to a molecular complex derived from a number of co-crystal formers known in the art. Unlike a salt, a co-crystal typically does not involve hydrogen transfer between the co-crystal and the drug, and instead involves intermolecular interactions, such as hydrogen bonding, aromatic ring stacking, or dispersive forces, between the co-crystal former and the drug in the crystal structure.

[0737] Exemplary surfactants which can be used to form pharmaceutical compositions and dosage forms encompassed by the present invention include, but are not limited to, hydrophilic surfactants, lipophilic surfactants, and mixtures thereof. That is, a mixture of hydrophilic surfactants can be employed, a mixture of lipophilic surfactants can be employed, or a mixture of at least one hydrophilic surfactant and at least one lipophilic surfactant can be employed. Hydrophilic surfactants can be either ionic or non-ionic. Suitable ionic surfactants include, but are not limited to, alkylammonium salts; fusidic acid salts; fatty acid derivatives of amino acids, oligopeptides, and polypeptides; glyceride derivatives of amino acids, oligopeptides, and polypeptides; lecithins and hydrogenated lecithins; lysolecithins and hydrogenated lysolecithins; phospholipids and derivatives thereof; lysophospholipids and derivatives thereof; carnitine fatty acid ester salts; salts of alkylsulfates; fatty acid salts; sodium docusate; acylactylates; mono- and di-acetylated tartaric acid esters of mono- and di-glycerides; succinylated mono- and di-glycerides; citric acid esters of mono- and di-glycerides; and mixtures thereof. Ionic surfactants can include, by way of example: lecithins, lysolecithin, phospholipids, lysophospholipids and derivatives thereof; carnitine fatty acid ester salts; salts of alkylsulfates; fatty acid salts; sodium docusate; acylactylates; mono- and di-acetylated tartaric acid esters of mono- and di-glycerides; succinylated mono- and di-glycerides; citric acid esters of mono- and di-glycerides; and mixtures thereof.

[0738] Ionic surfactants can be the ionized forms of lecithin, lysolecithin, phosphatidylcholine, phosphatidylethanolamine, phosphatidylglycerol, phosphatidic acid, phosphatidylserine, lysophosphatidylcholine, lysophosphatidylethanolamine, lysophosphatidylglycerol, lysophosphatidic acid, lysophosphatidylserine, PEG-phosphatidylethanolamine, PVP-phosphatidylethanolamine, lactylic esters of fatty acids, stearoyl-2-lactylate, stearoyl lactylate, succinylated monoglycerides, mono/diacetylated tartaric acid esters of mono/diglycerides, citric acid esters of mono/diglycerides, cholylsarcosine, caproate, caprylate, caprate, laurate, myristate, palmitate, oleate, ricinoleate, linoleate, linolenate, stearate, lauryl sulfate, teracecyl sulfate, docusate, lauroyl carnitines, palmitoyl carnitines, myristoyl carnitines, and salts and mixtures thereof.

[0739] Hydrophilic non-ionic surfactants can include, but not limited to, alkylglucosides; alkylmaltosides; alkylthioglucosides; lauryl macrogolglycerides; polyoxyalkylene alkyl ethers such as polyethylene glycol alkyl ethers; polyoxyalkylene alkylphenols such as polyethylene glycol alkyl phenols; polyoxyalkylene alkyl phenol fatty acid esters such as polyethylene glycol fatty acids monoesters and polyethylene glycol fatty acids diesters; polyethylene glycol glycerol fatty acid esters; polyglycerol fatty acid esters; polyoxyalkylene sorbitan fatty acid esters such as polyethylene glycol sorbitan fatty acid esters; hydrophilic transesterifcation products of a polyol with at least one member of the group consisting of glycerides, vegetable oils, hydrogenated vegetable oils, fatty acids, and sterols; polyoxyethylene sterols, derivatives, and analogues thereof; polyoxyethylated vitamins and derivatives thereof; polyoxyethylene-polyoxypropylene block copolymers; and mixtures thereof; polyethylene glycol sorbitan fatty acid esters and hydrophilic transesterification products of a polyol with at least one member of the group consisting of triglycerides, vegetable oils, and hydrogenated vegetable oils. The polyol can be glycerol, ethylene glycol, polyethylene glycol, sorbitol, propylene glycol, pentaerythritol, or a saccharide.

[0740] Other hydrophilic-non-ionic surfactants include, without limitation, PEG-10 laurate, PEG-12 laurate, PEG-20 laurate, PEG-32 laurate, PEG-32 dilaurate, PEG-12 oleate, PEG-oleate, PEG-20 oleate, PEG-20 dioleate, PEG-32 oleate, PEG-200 oleate, PEG-400 oleate, PEG-15 stearate, PEG-32 distearate, PEG-40 stearate, PEG-100 stearate, PEG-20 dilaurate, PEG-25 glyceryl trioleate, PEG-32 dioleate, PEG-20 glyceryl laurate, PEG-30 glyceryl laurate, PEG-20 glyceryl stearate, PEG-20 glyceryl oleate, PEG-30 glyceryl oleate, PEG-30 glyceryl laurate, PEG-40 glyceryl laurate, PEG-40 palm kernel oil, PEG-50 hydrogenated castor oil, PEG-40 castor oil, PEG-35 castor oil, PEG-60 castor oil, PEG-40 hydrogenated castor oil, PEG-60 hydrogenated castor oil, PEG-60 corn oil, PEG-6 caprate/caprylate glycerides, PEG-8 caprate/caprylate glycerides, polyglyceryl-10 laurate, PEG-30 cholesterol, PEG-25 phyto sterol, PEG-30 soya sterol, PEG-20 trioleate, PEG-40 sorbitan oleate, PEG-80 sorbitan laurate, polysorbate 20, polysorbate 80, POE-9 lauryl ether, POE-23 lauryl ether, POE-10 oleyl ether, POE-20 oleyl ether, POE-20 stearyl ether, tocopheryl PEG-100 succinate, PEG-24 cholesterol, polyglyceryl-10 oleate, Tween 40, Tween 60, sucrose monostearate, sucrose monolaurate, sucrose monopalmitate, PEG 10-100 nonyl phenol series, PEG 15-100 octyl phenol series, and poloxamers.

[0741] Suitable lipophilic surfactants can include, but are not limited to, fatty alcohols; glycerol fatty acid esters; acetylated glycerol fatty acid esters; lower alcohol fatty acids esters; propylene glycol fatty acid esters; sorbitan fatty acid esters; polyethylene glycol sorbitan fatty acid esters; sterols and sterol derivatives; polyoxyethylated sterols and sterol derivatives; polyethylene glycol alkyl ethers; sugar esters; sugar ethers: lactic acid derivatives of mono- and di-glycerides; hydrophobic transesterification products of a polyol with at least one member of the group consisting of glycerides, vegetable oils, hydrogenated vegetable oils, fatty acids and sterols; oil-soluble vitamins/vitamin derivatives; and mixtures thereof. Within this group, preferred lipophilic surfactants include glycerol fatty acid esters, propylene glycol fatty acid esters, and mixtures thereof, or are hydrophobic transesterification products of a polyol with at least one member of the group consisting of vegetable oils, hydrogenated vegetable oils, and triglycerides.

[0742] Solubilizers can be included in the present formulations to ensure good solubilization and/or dissolution of the agent (e.g., a chemical compound) encompassed by the present invention and to minimize precipitation of the drug modality encompassed by the present invention. This can be especially important for compositions for non-oral use, such as compositions for injection. A solubilizer can also be added to increase the solubility of the hydrophilic drug and/or other components, such as surfactants, or to maintain the composition as a stable or homogeneous solution or dispersion. Examples of suitable solubilizers include, but are not limited to, the following: alcohols and polyols, such as ethanol, isopropanol, butanol, benzyl alcohol, ethylene glycol, propylene glycol, butanediols and isomers thereof, glycerol, pentaerythritol, sorbitol, mannitol, transcutol, dimethyl isosorbide, polyethylene glycol, polypropylene glycol, polyvinylalcohol, hydroxypropyl methylcellulose and other cellulose derivatives, cyclodextrins and cyclodextrin derivatives; ethers of polyethylene glycols having an average molecular weight of about 200 to about 6000, such as tetrahydrofurfuryl alcohol PEG ether (glycofurol) or methoxy PEG; amides and other nitrogen-containing compounds such as 2-pyrrolidone, 2-piperidone, [symbol] -caprolactam, N-alkylpyrrolidone, N-hydroxyalkylpyrrolidone, N-alkylpiperidone, N-alkylcaprolactam, dimethylacetamide and polyvinylpyrrolidone; esters such as ethyl propionate, tributylcitrate, acetyl triethylcitrate, acetyl tributyl citrate, triethylcitrate, ethyl oleate, ethyl caprylate, ethyl butyrate, triacetin, propylene glycol monoacetate, propylene glycol diacetate, epsilon-caprolactone and isomers thereof, j-valerolactone and isomers thereof, ü-butyrolactone and isomers thereof; and other solubilizers known in the art, such as dimethyl acetamide, dimethyl isosorbide, N-methyl pyrrolidones, monooctanoin, diethylene glycol monoethyl ether, and water.

[0743] Mixtures of solubilizers can also be used. Examples include, but not limited to, triacetin, triethylcitrate, ethyl oleate, ethyl caprylate, dimethylacetamide, N-methylpyrrolidone, N-hydroxyethylpyrrolidone, polyvinylpyrrolidone, hydroxypropyl methylcellulose, hydroxypropyl cyclodextrins, ethanol, polyethylene glycol 200-100, glycofurol, transcutol, propylene glycol, and dimethyl isosorbide. Particularly preferred solubilizers include sorbitol, glycerol, triacetin, ethyl alcohol, PEG-400, glycofurol and propylene glycol.

[0744] Pharmaceutically acceptable additives can be included in a formulation as needed. Such additives and excipients include, without limitation, detackifiers, anti-foaming agents, buffering agents, polymers, antioxidants, preservatives, chelating agents, viscomodulators, tonicifiers, flavorants, colorants, odorants, opacifiers, suspending agents, binders, fillers, plasticizers, lubricants, and mixtures thereof.

[0745] In addition, an acid or a base can be incorporated into the composition to facilitate processing, to enhance stability, or for other reasons. Examples of pharmaceutically acceptable bases include amino acids, amino acid esters, ammonium hydroxide, potassium hydroxide, sodium hydroxide, sodium hydrogen carbonate, aluminum hydroxide, calcium carbonate, magnesium hydroxide, magnesium aluminum silicate, synthetic aluminum silicate, synthetic hydrocalcite, magnesium aluminum hydroxide, diisopropylethylamine, ethanolamine, ethylenediamine, triethanolamine, triethylamine, triisopropanolamine, trimethylamine, tris(hydroxymethyl)aminomethane (TRIS) and the like. Also suitable are bases that are salts of a pharmaceutically acceptable acid, such as acetic acid, acrylic acid, adipic acid, alginic acid, alkanesulfonic acid, amino acids, ascorbic acid, benzoic acid, boric acid, butyric acid, carbonic acid, citric acid, fatty acids, formic acid, fumaric acid, gluconic acid, hydroquinosulfonic acid, isoascorbic acid, lactic acid, maleic acid, oxalic acid, para-bromophenylsulfonic acid, propionic acid, p-toluenesulfonic acid, salicylic acid, stearic acid, succinic acid, tannic acid, tartaric acid, thioglycolic acid, toluenesulfonic acid, uric acid, and the like. Salts of polyprotic acids, such as sodium phosphate, disodium hydrogen phosphate, and sodium dihydrogen phosphate can also be used. When the base is a salt, the cation can be any convenient and pharmaceutically acceptable cation, such as ammonium, alkali metals and alkaline earth metals. Example can include, but not limited to, sodium, potassium, lithium, magnesium, calcium and ammonium.

[0746] Suitable acids are pharmaceutically acceptable organic or inorganic acids. Examples of suitable inorganic acids include hydrochloric acid, hydrobromic acid, hydriodic acid, sulfuric acid, nitric acid, boric acid, phosphoric acid, and the like. Examples of suitable organic acids include acetic acid, acrylic acid, adipic acid, alginic acid, alkanesulfonic acids, amino acids, ascorbic acid, benzoic acid, boric acid, butyric acid, carbonic acid, citric acid, fatty acids, formic acid, fumaric acid, gluconic acid, hydroquinosulfonic acid, isoascorbic acid, lactic acid, maleic acid, methanesulfonic acid, oxalic acid, para-bromophenylsulfonic acid, propionic acid, p-toluenesulfonic acid, salicylic acid, stearic acid, succinic acid, tannic acid, tartaric acid, thioglycolic acid, toluenesulfonic acid and uric acid.

### 3. Lipid-Based Formulations

[0747] In some embodiments, lipid-based formulations are used. Accordingly, provided herein are lipid-based formulations comprising a composition as described herein and one or more lipids. In some embodiments, the lipidisalipid particle or amphiphilic compound. The lipid can be neutral, anionic, or cationic at physiologic pH.

[0748] Suitable solid lipids include, but are not limited to, higher saturated alcohols, higher fatty acids, sphingolipids, synthetic esters, and mono-, di-, and triglycerides of higher saturated fatty acids. Solid lipids can include aliphatic alcohols having 10-40, preferably 12-30 carbon atoms, such as cetostearyl alcohol. Solid lipids can include higher fatty acids of 10-40, preferably 12-30 carbon atoms, such as stearic acid, palmitic acid, decanoic acid, and behenic acid. Solid lipids can include glycerides, including monoglycerides, diglycerides, and triglycerides, of higher saturated fatty acids having 10-40, preferably 12-carbon atoms, such as glyceryl monostearate, glycerol behenate, glycerol palmitostearate, glycerol trilaurate, tricaprin, trilaurin, trimyristin, tripalmitin, tristearin, and hydrogenated castor oil. Suitable solid lipids can include cetyl palmitate, beeswax, or cyclodextrin.

[0749] Amphiphilic compounds include, but are not limited to, phospholipids, such as 1,2 distearoyl-sn-glycero-3-phosphoethanolamine (DSPE), dipalmitoylphosphatidylcholine (DPPC), distearoylphosphatidylcholine (DSPC), diarachidoylphosphatidylcholine (DAPC), dibehenoylphosphatidylcholine (DBPC), ditricosanoylphosphatidylcholine (DTPC), and dilignoceroylphatidylcholine (DLPC), incorporated at a ratio of between 0.01-60 (weight lipid/w polymer), for example, between 0.1-30 (weight lipid/w polymer). Phospholipids which can be used include, but are not limited to, phosphatidic acids, phosphatidyl cholines with both saturated and unsaturated lipids, phosphatidyl ethanolamines, phosphatidylglycerols, phosphatidylserines, phosphatidylinositols, lysophosphatidyl derivatives, cardiolipin, and β-acyl-γ-alkyl phospholipids. Examples of phospholipids include, but are not limited to, phosphatidylcholines such as dioleoylphosphatidylcholine, dimyristoylphosphatidylcholine, dipentadecanoylphosphatidylcholine dilauroylphosphatidylcholine, dipalmitoylphosphatidylcholine (DPPC), distearoylphosphatidylcholine (DSPC), diarachidoylphosphatidylcholine (DAPC), dibehenoylphosphatidylcho-line (DBPC), ditricosanoylphosphatidylcholine (DTPC), dilignoceroylphatidylcholine (DLPC); and phosphatidylethanolamines such as dioleoylphosphatidylethanolamine or 1-hexadecyl-2-palmitoylglycerophos-phoethanolamine. Synthetic phospholipids with asymmetric acyl chains (e.g., with one acyl chain of 6 carbons and another acyl chain of 12 carbons) can also be used.

[0750] In some embodiments, lipid-based particles are used. The term “lipid particles” refers to liposomes, lipid micelles, solid lipid particles, lipoplexes, lipid nanoparticles (LNPs), or lipid-stabilized polymeric particles, composed of one or a mixture of different biocompatible lipids, e.g., at least one or more cationic lipids and/or one or more neutral lipids and/or polyethylene glycol (PEG)-lipids.

[0751] The particle can be a lipid micelle. Lipid micelles can be formed, for instance, as a water-in-oil emulsion with a lipid surfactant. An emulsion is a blend of two immiscible phases wherein a surfactant is added to stabilize the dispersed droplets. In some embodiments the lipid micelle is a microemulsion. A microemulsion is a thermodynamically stable system composed of at least water, oil and a lipid surfactant producing a transparent and thermodynamically stable system whose droplet size is less than 1 micron, from about 10 nm to about 500 nm, or from about 10 nm to about 250 nm. Lipid micelles are generally useful for encapsulating hydrophobic active agents, including hydrophobic therapeutic agents, hydrophobic prophylactic agents, or hydrophobic diagnostic agents.

[0752] The particle can be a solid lipid particle. Solid lipid particles present an alternative to the colloidal micelles and liposomes. Solid lipid particles are typically submicron in size, i.e. from about 10 nm to about 1 micron, from 10 nm to about 500 nm, or from 10 nm to about 250 nm. Solid lipid particles are formed of lipids that are solids at room temperature. They are derived from oil-in-water emulsions, by replacing the liquid oil by a solid lipid.

[0753] The particle can be a liposome. Liposomes are small vesicles composed of an aqueous medium surrounded by lipids arranged in spherical bilayers. Liposomes can be classified as small unilamellar vesicles, large unilamellar vesicles, or multi-lamellar vesicles. Multi-lamellar liposomes contain multiple concentric lipid bilayers. Liposomes can be used to encapsulate agents, by trapping hydrophilic agents in the aqueous interior or between bilayers, or by trapping hydrophobic agents within the bilayer.

[0754] The lipid micelles and liposomes typically have an aqueous center. The aqueous center can contain water or a mixture of water and alcohol. Suitable alcohols include, but are not limited to, methanol, ethanol, propanol, (such as isopropanol), butanol (such as 1-butanol, isobutanol, sec-butanol, tert-butanol, pentanol (such as amyl alcohol, isobutyl carbinol), hexanol (such as 1-hexanol, 2-hexanol, 3-hexanol), heptanol (such as 1-heptanol, 2-heptanol, 3-heptanol and 4-heptanol) or octanol (such as 1-octanol) or a combination thereof.

[0755] Liposomes are artificially-prepared vesicles which can primarily be composed of a lipid bilayer and can be used as a delivery vehicle for the administration of nutrients and pharmaceutical formulations. Liposomes can be of different sizes such as, but not limited to, a multilamellar vesicle (MLV) which can be hundreds of nanometers in diameter and can contain a series of concentric bilayers separated by narrow aqueous compartments, a small unicellular vesicle (SUV) which can be smaller than 50 nm in diameter, and a large unilamellar vesicle (LUV) which can be between 50 and 500 nm in diameter. Liposome design can include, but is not limited to, opsonins or ligands in order to improve the attachment of liposomes to unhealthy tissue or to activate events such as, but not limited to, endocytosis. Liposomes can contain a low or a high pH in order to improve the delivery of the pharmaceutical formulations.

[0756] The formation of liposomes can depend on the physicochemical characteristics such as, but not limited to, the pharmaceutical formulation entrapped and the liposomal ingredients, the nature of the medium in which the lipid vesicles are dispersed, the effective concentration of the entrapped substance and its potential toxicity, any additional processes involved during the application and/or delivery of the vesicles, the optimization size, polydispersity and the shelf-life of the vesicles for the intended application, and the batch-to-batch reproducibility and possibility of large-scale production of safe and efficient liposomal products.

[0757] In one embodiment, pharmaceutical compositions described herein can include, without limitation, liposomes such as those formed from 1,2-dioleyloxy-NN-dimethylaminopropane (DODMA) liposomes, DiLa2 liposomes from Marina Biotech (Bothell, Wash.), 1,2-dilinoleyloxy-3-dimethylaminopropane (DLin-DMA), 2,2-dilinoleyl-4-(2-dimethylaminoethyl)-[1,3]-dioxolane (DLin-KC2-DMA), and MC3 (e.g., as described in U.S. Pat. Publ. No. 2010/0324120).

[0758] In one embodiment, the compositions encompassed by the present invention can be formulated in a lipid-polycation complex. The formation of the lipid-polycation complex can be accomplished by methods known in the art and/or as described in U.S. Pat. Publ. No. 2012/0178702. As a non-limiting example, the polycation can include a cationic peptide or a polypeptide such as, but not limited to, polylysine, polyornithine and/or polyarginine and the cationic peptides described in PCT Publ. No. WO 2012/013326. In another embodiment, the compositions encompassed by the present invention can be formulated in a lipid-polycation complex which can further include a neutral lipid such as, but not limited to, cholesterol or dioleoyl phosphatidylethanolamine (DOPE). The liposome formulation can be influenced by, but not limited to, the selection of the cationic lipid component, the degree of cationic lipid saturation, the nature of the PEGylation, ratio of all components and biophysical parameters such as size.

[0759] In some embodiments, the lipid particle is a lipid nanoparticle (LNP). The term “lipid nanoparticle (LNP)” refers to lipid-based particles in the submicron range which include one or more lipid components as described herein. LNPs can have structural characteristics of liposomes and/or have alternative non-bilayer types of structures, which can be used to systemically deliver nucleic acid based drugs, including, for example, siRNA molecules complementary to the nucleic acid sequence of mRNA transcribed from at least one biomarker (e.g., at least one target listed in Table 1 and/or Table 2) described herein. In some embodiments, the LNP formulation comprises one or more cationic lipids. Cationic lipids are lipids that carry a net positive charge at any physiological pH. In certain particular embodiments, the LNP comprises a lipidoid as described herein. The positive charge is useful for association with negatively charged therapeutic agents, such as siRNA molecules.

[0760] In certain embodiments, a lipid nanoparticle comprises one or more lipids and a composition as described herein. In certain particular embodiments, a composition as described herein is encapsulated within a lipid nanoparticle.

[0761] In some embodiments, the sizes and charge ratios and other physical properties (e.g., membrane fluidity) of LNPs are optimized for increased cell transfection and delivery.

[0762] Lipid or lipidoid particles can comprise, for example, cationic lipids, neutral lipids, amino acid- or peptide-based lipids, polyethylene glycol (PEG)-lipids, e.g., lipids with PEG chains such as hydrogenated soybean phosphatidylcholine (HSPC), cholesterol (CHE), 1, 2-distearoyl-glycero-3-phosphoethanolamine-N-[methoxy (PEG)-2000] (DSPE-PEG2000), 1, 2-distearoyl-sn-glycero-3-phosphoethanolamine-N-[methoxy (PEG)-2000] modified with a maleimidic group in the distal end of the chain 1, 2-distearoyl-sn-glycero-3-phosphoethanolamine-N-[maleimide (PEG)-2000], DSPE-PEG2000-MAL, 1,2-dimyristoyl-sn-glycero-3-phosphoethanolamine-N-[methoxy(polyethylene glycol)-550](DMPE-PEG550), 1, 2-dioleoyl-1-3-trimethylammonium propane (DOTAP), and those with a glycerol backbone e.g., DMG-PEG, DSG-PEG (DMG-PEG2000) etc. As used herein, a liposome is a structure comprising lipid-containing membranes enclosing an aqueous interior. For example, lipid-based formulations can be used to deliver nucleic acid agents of the present invention, e.g., siRNAs, miRNAs, oligonucleotides, modified mRNAs and other types of nucleic acid molecules.

[0763] Suitable neutral and anionic lipids include, but are not limited to, sterols and lipids such as cholesterol, phospholipids, lysolipids, lysophospholipids, sphingolipids or pegylated lipids. Neutral and anionic lipids include, but are not limited to, phosphatidylcholine (PC) (such as egg PC, soy PC), including 1,2-diacyl-glycero-3-phosphocholines; phosphatidylserine (PS), phosphatidylglycerol, phosphatidylinositol (PI); glycolipids; sphingophospholipids such as sphingomyelin and sphingoglycolipids (also known as 1-ceramidyl glucosides) such as ceramide galactopyranoside, gangliosides and cerebrosides; fatty acids, sterols, containing a carboxylic acid group for example, cholesterol; 1,2-diacyl-sn-glycero-3-phosphoethanolamine, including, but not limited to, 1,2-dioleylphosphoethanolamine (DOPE), 1,2-dihexadecylphosphoethanolamine (DHPE), 1,2-distearoylphosphatidylcholine (DSPC), 1,2-dipalmitoyl phosphatidylcholine (DPPC), and 1,2-dimyristoylphosphatidylcholine (DMPC). The lipids can also include various natural (e.g., tissue derived L-α-phosphatidyl: egg yolk, heart, brain, liver, soybean) and/or synthetic (e.g., saturated and unsaturated 1,2-diacyl-sn-glycero-3-phosphocholines, 1-acyl-2-acyl-sn-glycero-3-phosphocholines, 1,2-diheptanoyl-SN-glycero-3-phosphocholine) derivatives of the lipids.

[0764] A number of cationic lipids, and methods for making them, are described in, for example, U.S. Pat. Nos. 5,830,430; 6,056,938; 7,893,302; 7,404,969; 8,034,376; 8,283,333; and 8,642,076, as well as PCT Publ. Numbers WO 2010/054406, WO 2010/054401, WO 2010/054405, WO 2010/054384, WO 2012/040184, WO 2011/153120, WO 2011/149733, WO 2011/090965, WO 2011/043913, WO 2011/022460, WO 2012/061259, WO 2012/054365, WO 2012/044638, WO 2010/080724, WO 2010/21865, and WO 2008/103276.

[0765] The term “cationic lipid” is meant to include those lipids having one or two fatty acid or fatty aliphatic chains and an amino head group (including an alkylamino or dialkylamino group) that can be protonated to form a cationic lipid at physiological pH, which consist of a positively charged headgroup and a hydrophobic tail. The positively charged headgroup can serve to electrostatically bind the negatively charged siRNA molecule, while the hydrophobic tail leads to self-assembly into lipophilic particles. Examples of cationic lipids can include, but are not limited to: DLin-K-DMA, DLinDMA, DLinDAP, DLin-K-C2-DMA, DLin-K2-DMA, DOTAP, DMRIE, DORIE, DOTMA, DDAB, Ethyl PC, multivalent cationic lipid and DC-cholesterol, DODA, DODMA, DSDMA, DOTMA, DDAB, DODAP, DOTAP, DOTAP-C1, DC-Chol, DMRIE, DOSPA, DOGS, DOPE, CLinDMA, CpLinDMA, DMOBA, DOcarbDAP, DLincarbDAP, DLinCDAP. A number of these lipids and related analogs have been described in U.S. Pat. Publ. Numbers 2006/0083780 and 2006/0240554; and U.S. Pat. Nos. 5,208,036; 5,264,618; 5,279,833; 5,283,185; 5,753,613 and 5,785,992. Cationic lipids can also be a lipofectin (see, e.g., U.S. Pat. No. 5,705,188), such as Lipofectamine®, Lipofectamine 2000®, Lipofectamine 3000®, RNAiMAX®, and the like.

[0766] Other cationic lipids, which carry a net positive charge at about physiological pH, can be used in the lipid particles of the present invention, including, but not limited to, N,N-dioleyl-N,N-dimethylammonium chloride (DODAC), dioctadecyldimethylammonium (DODMA), distearyldimethylammonium (DSDMA), N-(1-(2,3-dioleyloxy)propyl)-N,N,N-trimethylammonium chloride (DOTMA), N,N-distearyl-N,N-dimethylammonium bromide (DDAB), 1,2-dioleoyl-3-dimethylammonium propane (DODAP), N-(1-(2,3-dioleoyloxy)propyl)-N,N,N-trimethylammonium chloride (DOTAP), 1,2-Dioleyloxy-3-trimethylaminopropane chloride salt (DOTAP.Cl), 3-(N—(N′,N′-dimethylaminoethane)-carbamoyl)cholesterol (DC-Chol), N-(1,2-dimyristyloxyprop-3-yl)-N,N-dimethyl-N-hydroxyethyl ammonium bromide (DMRIE), 2,3-dioleyloxy-N-[2(spermine-carboxamido)ethyl]-N,N-dimethyl-1-propanaminiumtrifluoroacetate (DOSPA), dioctadecylamidoglycyl spermine (DOGS). 1,2-dileovl-sn-3-phosphoethanolamine (DOPE, which carries a positive charge at physiological pH but at acidic pH), 3-dimethylamino-2-(cholest-5-en-3-beta-oxybutan-4-oxy)-1-(cis,cis-9,12-octadecadienoxy)propane (CLinDMA), 2-[5′-(cholest-5-en-3β-oxy)-3′-oxapentoxy)-3-dimethyl-1-(cis,cis-9′,1-2′-octadecadienoxy)propane (CpLinDMA), N,N-dimethyl-3,4-dioleyloxybenzylamine (DMOBA), 1,2-N,N′-dioleylcarbamyl-3-dimethylaminopropane (DOcarbDAP), 1,2-N,N′-Dilinoleylcarbamyl-3-dimethylaminopropane (DLincarbDAP), 1,2-Dilinoleoylcarbamyl-3-dimethylaminopropane (DLinCDAP), and mixtures thereof. A number of these lipids and related analogs have been described in U.S. patent application publication NOs. 2006/0083780 and 2006/0240554; U.S. Pat. Nos. 5,208,036; 5,264,618; 5,279,833; 5,283,185; 5,753,613 and 5,785,992.

[0767] Suitable additional cationic lipids can also include, but are not limited to, N-[1-(2,3-dioleoyloxy)propyl]-N,N,N-trimethyl ammonium salts, also referenced as TAP lipids, for example methylsulfate salt. Suitable TAP lipids include, but are not limited to, DOTAP (dioleoyl-), DMTAP (dimyristoyl-), DPTAP (dipalmitoyl-), and DSTAP (distearoyl-). Suitable cationic lipids in the liposomes include, but are not limited to, dimethyldioctadecyl ammonium bromide (DDAB), 1,2-diacyloxy-3-trimethylammonium propanes, N-[1-(2,3-dioloyloxy)propyl]-N,N-dimethyl amine (DODAP), 1,2-diacyloxy-3-dimethylammonium propanes, N-[1-(2,3-dioleyloxy)propyl]-N,N,N-trimethylammonium chloride (DOTMA), 1,2-dialkyloxy-3-dimethylammonium propanes, dioctadecylamidoglycylspermine (DOGS), 3-[N—(N′,N′-dimethylamino-ethane)carbamoyl]cholesterol (DC-Chol); 2,3-dioleoyloxy-N-(2-(sperminecarboxamido)-ethyl)-N,N-dimethyl-1-propanaminium trifluoro-acetate (DOSPA), 0-alanyl cholesterol, cetyl trimethyl ammonium bromide (CTAB), diCia-amidine, N-ferf-butyl-N′-tetradecyl-3-tetradecylamino-propionamidine, N-(alpha-trimethylammonioacetyl)didodecyl-D-glutamate chloride (TMAG), ditetradecanoyl-N-(trimethylammonio-acetyl)diethanolamine chloride, 1,3-dioleoyloxy-2-(6-carboxy-spermyl)-propylamide (DOSPER), and N, N, N′, N′-tetramethyl-, N′-bis(2-hydroxylethyl)-2,3-dioleoyloxy-1,4-butanediammonium iodide. In one embodiment, the cationic lipids can be 1-[2-(acyloxy)ethyl]2-alkyl(alkenyl)-3-(2-hydroxyethyl)-imidazolinium chloride derivatives, for example, 1-[2-(9(Z)-octadecenoyloxy)ethyl]-2-(8(Z)-heptadecenyl-3-(2-hydroxyethyl)imidazolinium chloride (DOTIM), and 1-[2-(hexadecanoyloxy)ethyl]-2-pentadecyl-3-(2-hydroxyethyl)imidazolinium chloride (DPTIM). In one embodiment, the cationic lipids can be 2,3-dialkyloxypropyl quaternary ammonium compound derivatives containing a hydroxyalkyl moiety on the quaternary amine, for example, 1,2-dioleoyl-3-dimethyl-hydroxyethyl ammonium bromide (DORI), 1,2-dioleyloxypropyl-3-dimethyl-hydroxyethyl ammonium bromide (DORIE), 1,2-dioleyloxypropyl-3-dimetyl-hydroxypropyl ammonium bromide (DORIE-HP), 1,2-dioleyl-oxy-propyl-3-dimethyl-hydroxybutyl ammonium bromide (DORIE-HB), 1,2-dioleyloxypropyl-3-dimethyl-hydroxypentyl ammonium bromide (DORIE-Hpe), 1,2-dimyristyloxypropyl-3-dimethyl-hydroxylethyl ammonium bromide (DMRIE), 1,2-dipalmityloxypropyl-3-dimethyl-hydroxyethyl ammonium bromide (DPRIE), and 1,2-disteryloxypropyl-3-dimethyl-hydroxyethyl ammonium bromide (DSRIE).

[0768] Cationic lipids can also be ionizable cationic lipids. Suitable ionizable cationic lipids for use in formulating a composition described herein include lipids described in WO2015/074805. Other suitable ionizable cationic lipids suitable for formulating a composition of the present invention can include those described in US 2015/0239834.

[0769] In some embodiments, symmetric or asymmetric or ionizable cationic lipids can be used in a nanoparticle or lipid formulation. Such lipids are disclosed in, for example, U.S. Patent application publication Nos. 2015/0239926, 2015/0239834 and 2015/0141678 and PCT Publ. No. WO 2015/074805.

[0770] Additionally, a number of commercial preparations of cationic lipids can be used, such as LIPOFECTIN® (including DOTMA and DOPE, available from GIBCO/BRL), LIPOFECTAMINE® (comprising DOSPA and DOPE, available from GIBCO/BRL), TRANSFECTIN® (from Bio-Rad Laboratories, Inc.) and siPORT NEOFX® (from Applied Biosystems).

[0771] Cationic lipids can also be modified cationic lipids suitable for cellular delivery of compositions comprising agents described herein, such as siRNA molecules (see, for example, those described in U.S. Pat. Publ. No. 2013/0323269); cationic glycerol derivatives, and polycationic molecules, such as polylysine (PCT Publ. No. WO 97/30731), cationic group including one or more biodegradable groups (U.S. Pat. Publ. No. 2013/0195920).

[0772] In some embodiments, the ionizable lipid can be ionizable amino lipids described in WO 2015/074805 or US 2015/0239834.

[0773] In certain embodiments, a composition described herein further comprises an aminoalcohol lipidoid as described in WO 2010/053572. In certain embodiments, the lipidoid compound is selected from Formulae (I)-(V):

[chemical structure]

[0774] and pharmaceutically acceptable salts thereof, wherein:

A is a substituted or unsubstituted, branched or unbranched, cyclic or acyclic C₂₋₂₀ alkylene, optionally interrupted by 1 or more heteroatoms independently selected from O, S and N, or A is a substituted or unsubstituted, saturated or unsaturated 4-6-membered ring;

[0775] R₁ is hydrogen, a substituted, unsubstituted, branched or unbranched C₁₋₂₀-aliphatic or a substituted, unsubstituted, branched or unbranched C₁₋₂₀ heteroaliphatic, wherein at least one occurrence of R₁ is hydrogen; R_{B}, R_{C}, and R_{D} are, independently, hydrogen, a substituted, unsubstituted, branched or unbranched C₁₋₂₀-aliphatic, or a substituted, unsubstituted, branched or unbranched C₁₋₂₀-heteroaliphatic or —CH₂CH(OH)R_{E};

[0776] R_{B} and R_{D} together can optionally form a cyclic structure;

[0777] R_{C} and R_{D} together can optionally form a cyclic structure; and
[0778] R_{E} is a substituted, unsubstituted, branched or unbranched C₁₋₂₀ aliphatic or a substituted, unsubstituted, branched or unbranched C₁₋₂₀ heteroaliphatic.

[0779] In certain particular embodiments, the lipidoid is of Formula (VI):

[chemical structure]

or a pharmaceutically acceptable salt thereof, wherein:

[0780] p is an integer between 1 and 3, inclusive;

[0781] m is an integer between 1 and 3, inclusive;

[0782] R_{A} is hydrogen; substituted or unsubstituted, cyclic or acyclic, branched or unbranched C₁₋₂₀ aliphatic; substituted or unsubstituted, cyclic or acyclic, branched or unbranched C₁₋₂₀ heteroaliphatic; substituted or unsubstituted aryl; substituted or unsubstituted heteroaryl;

[chemical structure]

[0783] R_{F} is hydrogen; substituted or unsubstituted, cyclic or acyclic, branched or unbranched C₁₋₂₀ aliphatic; substituted or unsubstituted, cyclic or acyclic, branched or unbranched C₁₋₂₀ heteroaliphatic; substituted or unsubstituted aryl; substituted or unsubstituted heteroaryl;

[chemical structure]

[0784] each occurrence of R₅ is independently hydrogen; substituted or unsubstituted, cyclic or acyclic, branched or unbranched C₁₋₂₀ aliphatic; substituted or unsubstituted, cyclic or acyclic, branched or unbranched C₁₋₂₀ heteroaliphatic; substituted or unsubstituted aryl; or substituted or unsubstituted heteroaryl;

[0785] wherein, at least one of R_{A}, R_{F}, R_{Y}, and R_{Z} is

[chemical structure]

[0786] each occurrence of x is an integer between 1 and 10, inclusive;

[0787] each occurrence of y is an integer between 1 and 10, inclusive;

[0788] each occurrence of R_{Y} is hydrogen; substituted or unsubstituted, cyclic or acyclic, branched or unbranched C₁₋₂₀ aliphatic; substituted or unsubstituted, cyclic or acyclic, branched or unbranched C₁₋₂₀ heteroaliphatic; substituted or unsubstituted aryl; substituted or unsubstituted heteroaryl;

[chemical structure]

[0789] each occurrence of R_{Z} is hydrogen; substituted or unsubstituted, cyclic or acyclic, branched or unbranched C₁₋₂₀ aliphatic; substituted or unsubstituted, cyclic or acyclic, branched or unbranched C₁₋₂₀ heteroaliphatic; substituted or unsubstituted aryl; substituted or unsubstituted heteroaryl;

[chemical structure]

[0790] In certain embodiments of Formula (VI), p is 1. In certain embodiments, m is 1. In certain embodiments, p and m are both 1. In certain embodiments, R_{F} is

[chemical structure]

In certain embodiments, R_{A} is

[chemical structure]

[0791] In certain embodiments, the composition comprises an aminoalcohol lipidoid selected from C14-120, C16-120, C14-98, C14-113, C14-96, C12-200, C12-205, C16-96, C12-111, and C12-210 (see U.S. Pat. No. 8,450,298 and PCT Publ. No. WO 2010/053572, referenced above).

[0792] In certain particular embodiments, the aminoalcohol lipidoid is C12-200:

[chemical structure]

[0793] In certain particular embodiments, the lipidoid is of Formula (VII):

[chemical structure]

[0794] or a pharmaceutically acceptable salt thereof, wherein:

[0795] each occurrence of R_{A} is independently hydrogen; substituted or unsubstituted, cyclic or acyclic, branched or unbranched C₁₋₂₀ aliphatic; substituted or unsubstituted, cyclic or acyclic, branched or unbranched C₁₋₂₀ heteroaliphatic; substituted or unsubstituted aryl; substituted or unsubstituted heteroaryl;

[chemical structure]

[0796] wherein at least one R_{A} is

[chemical structure]

[0797] each occurrence of R₅ is independently hydrogen; substituted or unsubstituted, cyclic or acyclic, branched or unbranched C₁₋₂₀ aliphatic; substituted or unsubstituted, cyclic or acyclic, branched or unbranched C₁₋₂₀ heteroaliphatic; substituted or unsubstituted aryl; or substituted or unsubstituted heteroaryl;

[0798] each occurrence of x is an integer between 1 and 10, inclusive; and

[0799] each occurrence of y is an integer between 1 and 10, inclusive.

[0800] In certain embodiments, a composition described herein further comprises an amine-containing lipidoid as described in WO 2014/028847.

[0801] In certain embodiments, the amine-containing lipidoid is of Formula (VIII):

[chemical structure]

[0802] or a pharmaceutically acceptable salt thereof, wherein:

[0803] each L is, independently, branched or unbranched C₁₋₆ alkylene, wherein L is optionally substituted with one or more fluorine radicals;

[0804] each R^{A} is, independently, branched or unbranched C₁₋₆ alkyl, C₃₋₇ cycloalkyl, or branched or unbranched C₄₋₁₂ cycloalkylalkyl, wherein R^{A} is optionally substituted with one or more fluorine radicals;

[0805] each R is, independently, hydrogen or —CH₂CH₂C(═O)OR^{B};

[0806] each R^{B} is, independently, C₁₀₋₁₄ alkyl, wherein R^{B} is optionally substituted with one or more fluorine radicals; and

[0807] q is 1, 2, or 3;

[0808] provided that at least three R groups are —CH₂CH₂C(═O)OR^{B};

[chemical structure]

[0809] provided that the compound is not CH₃

[0810] In certain embodiments, a composition described herein further comprises a polyamine-fatty acid derived lipidoid as described in WO 2016/004202.

[0811] In certain embodiments, the amine-containing lipidoid is of Formula (IX):

[chemical structure]

[0812] or a pharmaceutically acceptable salt, wherein:

[0813] X is substituted or unsubstituted alkylene, substituted or unsubstituted alkenylene, substituted or unsubstituted alkynylene, substituted or unsubstituted heteroalkylene, substituted or unsubstituted heteroalkenylene, substituted or unsubstituted heteroalkynylene, substituted or unsubstituted carbocyclylene, substituted or unsubstituted heterocyclylene, substituted or unsubstituted arylene, substituted or unsubstituted heteroarylene, a divalent moiety of the formula:

[chemical structure]

or a combination thereof, wherein each instance of R^{X} is independently hydrogen, substituted or unsubstituted alkyl, substituted or unsubstituted alkenyl, substituted or unsubstituted alkynyl, substituted or unsubstituted carbocyclyl, substituted or unsubstituted heterocyclyl, substituted or unsubstituted aryl, substituted or unsubstituted heteroaryl, a nitrogen protecting group, or a moiety of the formula:

[chemical structure]

or R^{B1} and an instance of R^{X} are joined to forma substituted or unsubstituted, heterocyclic ring or a substituted or unsubstituted, heteroaryl ring, or R^{B2} and an instance of R^{X} are joined to form a substituted or unsubstituted, heterocyclic ring or a substituted or unsubstituted, heteroaryl ring, wherein:

[0814] each instance of L^{X} is independently substituted or unsubstituted alkylene or substituted or unsubstituted heteroalkylene; and

[0815] each instance of R^{X1} is independently substituted or unsubstituted, C₄₋₃₀ alkyl, substituted or unsubstituted, C₄₋₃₀ alkenyl, or substituted or unsubstituted, C₄₋₃₀ alkynyl;

[0816] L^{1a} is substituted or unsubstituted alkylene or substituted or unsubstituted heteroalkylene;

[0817] R^{A1a} is substituted or unsubstituted, C₄₋₃₀ alkyl, substituted or unsubstituted, C₄₋₃₀ alkenyl, or substituted or unsubstituted, C₄₋₃₀ alkynyl;

[0818] R^{B1} is hydrogen, substituted or unsubstituted acyl, substituted or unsubstituted alkyl, substituted or unsubstituted alkenyl, substituted or unsubstituted alkynyl, substituted or unsubstituted carbocyclyl, substituted or unsubstituted heterocyclyl, substituted or unsubstituted aryl, substituted or unsubstituted heteroaryl, a nitrogen protecting group, or a moiety of the formula:

[chemical structure]

wherein L^{1b} is substituted or unsubstituted alkylene or substituted or unsubstituted heteroalkylene, and R^{A1b} is substituted or unsubstituted, C₄₋₃₀ alkyl, substituted or unsubstituted, C₄₋₃₀ alkenyl, or substituted or unsubstituted, C₄₋₃₀ alkynyl;

[0819] L^{2a} is substituted or unsubstituted alkylene or substituted or unsubstituted heteroalkylene;

[0820] R^{A2a} is substituted or unsubstituted, C₄₋₃₀ alkyl, substituted or unsubstituted, C₄₋₃₀ alkenyl, or substituted or unsubstituted, C₄₋₃₀ alkynyl; and

[0821] R^{B2} is hydrogen, substituted or unsubstituted acyl, substituted or unsubstituted alkyl, substituted or unsubstituted alkenyl, substituted or unsubstituted alkynyl, substituted or unsubstituted carbocyclyl, substituted or unsubstituted heterocyclyl, substituted or unsubstituted aryl, substituted or unsubstituted heteroaryl, a nitrogen protecting group, or a moiety of the formula:

[chemical structure]

wherein L^{2b} is substituted or unsubstituted alkylene or substituted or unsubstituted heteroalkylene, and R^{A2b} is substituted or unsubstituted, C₄₋₃₀ alkyl, substituted or unsubstituted, C₄₋₃₀ alkenyl, or substituted or unsubstituted, C₄₋₃₀ alkynyl; or
[0822] R^{B1} and R^{B2} are joined to form a substituted or unsubstituted, heterocyclic ring or a substituted or unsubstituted, heteroaryl ring.

[0823] In certain embodiments, a composition described herein further comprises an amino acid-, peptide- or polypeptide-lipid as described in WO 2013/063468. In certain embodiments, the amine-containing lipidoid is of Formula (X):

[chemical structure]

[0824] or a pharmaceutically acceptable salt, wherein:

[0825] p is an integer of between 1 and 9, inclusive;

[0826] each instance of Q is independently O, S, or NR^{Q}, wherein R^{Q} is hydrogen, optionally substituted alkyl, optionally substituted alkenyl, optionally substituted alkynyl, optionally substituted carbocyclyl, optionally substituted heterocyclyl, optionally substituted aryl, optionally substituted heteroaryl, a nitrogen protecting group, or a group of the formula (i), (ii), (iii);

[0827] each instance of R¹ is independently hydrogen, optionally substituted alkyl, optionally substituted alkenyl, optionally substituted alkynyl, optionally substituted carbocyclyl, optionally substituted heterocyclyl, optionally substituted aryl, optionally substituted heteroaryl, halogen, —OR^{A1}, —N(R^{A1})₂, —SR^{A1}; wherein each occurrence of R^{A1} is independently hydrogen, optionally substituted alkyl, optionally substituted alkenyl, optionally substituted alkynyl, optionally substituted carbocyclyl, optionally substituted heterocyclyl, optionally substituted aryl, optionally substituted heteroaryl, an oxygen protecting group when attached to an oxygen atom, a sulfur protecting group when attached to an sulfur atom, a nitrogen protecting group when attached to a nitrogen atom, or two R^{A1} groups are joined to form an optionally substituted heterocyclic or optionally substituted heteroaryl ring;

[0828] or at least one instance of R¹ is a group of formula:

[chemical structure]

[0829] wherein L is an optionally substituted alkylene, optionally substituted alkenylene, optionally substituted alkynylene, optionally substituted heteroalkylene, optionally substituted heteroalkenylene, optionally substituted heteroalkynylene, optionally substituted carbocyclylene, optionally substituted heterocyclylene, optionally substituted arylene, or optionally substituted heteroarylene, and

[0830] R⁶ and R⁷ are each independently selected from the group consisting of hydrogen, optionally substituted alkyl, optionally substituted alkenyl, optionally substituted alkynyl, optionally substituted carbocyclyl, optionally substituted heterocyclyl, optionally substituted aryl, optionally substituted heteroaryl, and a nitrogen protecting group,

[0831] each instance of R² is independently hydrogen, optionally substituted alkyl, optionally substituted alkenyl, optionally substituted alkynyl, optionally substituted carbocyclyl, optionally substituted heterocyclyl, optionally substituted aryl, optionally substituted heteroaryl, a nitrogen protecting group, or a group of the formula (i), (ii), or (iii); and

[0832] Formulae (i), (ii), and (iii) are:

[chemical structure]

wherein:

[0833] each instance of R′ is independently hydrogen or optionally substituted alkyl;

[0834] X is O, S, NR^{X}, wherein R^{X} is hydrogen, optionally substituted alkyl, optionally substituted alkenyl, optionally substituted alkynyl, optionally substituted carbocyclyl, optionally substituted heterocyclyl, optionally substituted aryl, optionally substituted heteroaryl, or a nitrogen protecting group;

[0835] Y is O, S, NR^{Y}, wherein R^{Y} is hydrogen, optionally substituted alkyl, optionally substituted alkenyl, optionally substituted alkynyl, optionally substituted carbocyclyl, optionally substituted heterocyclyl, optionally substituted aryl, optionally substituted heteroaryl, or a nitrogen protecting group;

[0836] R^{P} is hydrogen, optionally substituted alkyl, optionally substituted alkenyl, optionally substituted alkynyl, optionally substituted carbocyclyl, optionally substituted heterocyclyl, optionally substituted aryl, optionally substituted heteroaryl, an oxygen protecting group when attached to an oxygen atom, a sulfur protecting group when attached to a sulfur atom, or a nitrogen protecting group when attached to a nitrogen atom; and

[0837] R^{L} is optionally substituted C₁₋₅₀ alkyl, optionally substituted C₂₋₅₀ alkenyl, optionally substituted C₂₋₅₀ alkynyl, optionally substituted heteroC₁₋₅₀ alkyl, optionally substituted heteroC₂₋₅₀ alkenyl, optionally substituted heteroC₂₋₅₀ alkynyl, or a polymer;

[0838] provided that at least one instance of R^{Q}, R², R⁶, or R⁷ is a group of the formula (i), (ii), or (iii).

[0839] In certain particular embodiments, the amino acid-, peptide- or polypeptide-lipid has the formula:

[chemical structure]

[0840] In certain particular embodiments, a composition as described herein can be formulated with C12-200 containing lipid nanoparticles. In some embodiments, the C12-200 is present in a molar percentage of about 1.0% to about 60.0%, about 10.0% to 40.0%, or about 20.0% to about 50.0% of the total composition. In some embodiments, the composition comprises C12-200 in a concentration of about 5.0%, about 7.5%, about 10.0%, about 12.5%, about 15.0%, about 17.5%, about 20.0%, about 20.5%, about 21.0%, about 21.5%, about 22.0%, about 22.5%, about 23.0%, about 23.5%, about 24.0%, about 24.5%, about 25.0%, about 25.5%, about 26.0%, about 26.5%, about 27.0%, about 27.5%, about 28.0%, about 28.5%, about 29.0%, about 29.5%, about 30.0%, about 30.5%, about 31.0%, about 31.5%, about 32.0%, about 32.5%, about 33.0%, about 33.5%, about 34.0%, about 34.5%, about 35.0%, about 35.5%, about 36.0%, about 36.5%, about 37.0%, about 37.5%, about 38.0%, about 38.5%, about 39.0%, about 39.5%, about 40.0%, about 40.5%, about 41.0%, about 41.5%, about 42.0%, about 42.5%, about 43.0%, about 43.5%, about 44.0%, about 44.5%, about 45.0%, about 45.5%, about 46.0%, about 46.5%, about 47.0%, about 47.5%, about 48.0%, about 48.5%, about 49.0%, about 49.5%, about 50.0%, about 50.5%, about 51.0%, about 52.0%, about 53.0%, about 54.0%, about 55.0%, about 56.0%, about 57.0%, about 58.0%, about 59.0% or about 60.0% by mole of the total composition. In certain embodiments, the composition comprises about 50.0% by mole C12-200.

[0841] In some embodiments, the lipid nanoparticles can also include one or more auxiliary lipids (also referred to herein as “co-lipids”) including, but not limited to, neutral lipids, amphipathic lipids, PEG-containing lipids, anionic lipids, and sterols.

[0842] In some embodiments, the lipid nanoparticles further comprise one or more neutral lipids. Neutral lipids, when present, can be any of a number of lipid species, which exist either in an uncharged or neutral zwitterionic form at physiological pH. Such lipids include, for example, diacylphosphatidylcholine, diacylphosphatidylethanolamine, ceramide, sphingomyelin, dihydrosphingomyelin, cephalin, and cerebrosides. In some embodiments, the neutral lipid component is a lipid having two acyl groups (e.g., diacylphosphatidylcholine and diacylphosphatidylethanolamine). In some embodiments, the neutral lipid comprises saturated fatty acids with carbon chain lengths in the range of C₁₀ to C₂₀, inclusive, In some embodiments, the neutral lipid includes mono- or di-unsaturated fatty acids with carbon chain lengths in the range of C₁₀ to C₂₀, inclusive. Suitable neutral lipids include, but are not limited to, DPPC (Dipalmitoyl phosphatidylcholine), POPC (Palmitoyl-Oleoyl Phosphatidyl Cholin), DOPE (1,2-dioleoyl-sn-glycero-3-phosphoethanolamine), DSPC (disteroylphosphatidyl choline), egg L-alpha-phosphatidylcholine (EPC); 1,2-dipalmitoyl-sn-glycero-3-phosphoethanolamine (DPPE); and SM (Sphingomyelin). In some embodiments, the neutral lipid is DSPC (disteroylphosphatidyl choline). In some embodiments, the composition comprises DSPC at about 1.0% to about 20.0%, or from about 5.0% to about 10.0% by mole of the total composition. In some embodiments, the composition comprises DSPC at about 1.0%, about 1.5%, about 2.0%, about 2.5%, about 3.0%, about 3.5%, about 4.0%, about 4.5%, about 5.0%, about 5.5%, about 6.0%, about 6.5%, about 7.0%, about 7.5%, about 8.0%, about 8.5%, about 9.0%, about 9.5%, about 10.0%, about 10.5%, about 11.0%, about 11.5%, about 12.0%, about 12.5%, about 13.0%, about 13.5%, about 14.0%, about 14.5%, about 15.0%, about 15.5%, about 16.0%, about 16.5%, about 17.0%, about 17.5%, about 18.0%, about 18.5%, about 19.0% about 19.5% or about 20.0% by mole of the total composition. In some embodiments, composition comprises about 10% DSPC by mole.

[0843] In some embodiments, the lipid nanoparticles further comprise one or more anionic lipids. Anionic lipids are lipids that carry a net negative charge at physiological pH. Anionic lipids, when used in combination with cationic lipids, can reduce the overall surface charge of lipid particles, and/or introduce pH-dependent disruption of lipid structures, facilitating the release of therapeutic agents formulated in the lipid particles (e.g., siRNA molecules). Anionic lipids can include, but are not limited to, fatty acids (e.g., oleic, linoleic, linolenic acids); cholesteryl hemisuccinate (CHEMS); 1,2-di-0-tetradecyl-sn-glycero-3-phospho-(1′-rac-glycerol) (Diether PG); 1,2-dimyristoyl-sn-glycero-3-phospho-(1′-rac-glycerol) (sodium salt); 1,2-dimyristoyl-sn-glycero-3-phospho-L-serine (sodium salt); 1-hexadecanoyl,2-(9Z,12Z)-octadecadienoyl-sn-glycero-3-phosphate; 1,2-dioleoyl-sn-glycero-3-[phospho-rac-(1-glycerol)] (DOPG); dioleoylphosphatidic acid (DOPA); 1,2-dioleoyl-sn-glycero-3-phospho-L-serine (DOPS); and derivatives thereof. Other examples of suitable anionic lipids include, but are not limited to: fatty acids, such as oleic, linoleic, and linolenic acids; and cholesteryl hemisuccinate. Such lipids can be used alone or in combination, for a variety of purposes, such as to attach ligands to the liposome surface.

[0844] The lipid nanoparticle can also include one or more lipids capable of reducing aggregation. Examples of lipids that reduce aggregation of particles during formulation include PEG lipids (e.g., DMG-PEG (1,2-Dimyristoyl-sn-glycerol, methoxypolyethylene glycol-PEG), DMA-PEG (poly(ethylene glycol)-dimethacrylate-PEG) and DMPE-PEG550 (1,2-dimyristoyl-sn-glycero-3-phosphoethanolamine-N-[methoxy(polyethylene glycol)-550]), PEG), monosialoganglioside Gm1, and polyamide oligomers (PAO), such as those described in U.S. Pat. No. 6,320,017. The lipid nanoparticles can include DMPE-PEG2000 or DMG-PEG which could be substituted with DMPE-PEG2000 in any of the formulations taught herein. Other suitable PEG lipids include, but are not limited to, PEG-modified phosphatidylethanolamine and phosphatidic acid, PEG-ceramide conjugates (e.g., PEG-CerC₁₄ or PEG-CerC₂₀) (such as those described in U.S. Pat. No. 5,820,873), PEG-modified dialkylamines and PEG-modified 1,2-diacyloxypropan-3-amines, PEG-modified diacylglycerols and dialkylglycerols, mPEG (mw2000)-diastearoylphosphatidylethanolamine (PEG-DSPE).

[0845] In some embodiments, a lipid capable of reducing aggregation is DMPE-PEG2000 or DMG-PEG (1,2-Dimyristoyl-sn-glycerol, methoxypolyethylene glycol, PEG). In some embodiments, the compositions comprises about 0.1% to about 5.0% DMPE-PEG2000 or DMG-PEG by mole (i.e., about 0.1% to about 5.0% DMPE-PEG2000 or 0.1% to about 5.0% DMG-PEG) or from about 0.5% to 2.0% DMPE-PEG2000 or DMG-PEG by mole. In some embodiments, the composition comprises about 0.1%, about 0.2%, about 0.3%, about 0.4%, about 0.5%, about 0.6%, about 0.7%, about 0.8%, about 0.9%, about 1.0%, about 1.1%, about 1.2%, about 1.3%, about 1.4%, about 1.5%, about 1.6%, about 1.7%, about 1.8%, about 1.9%, about 2.0%, about 2.1%, about 2.2%, about 2.3%, about 2.4%, about 2.5%, about 2.6%, about 2.7%, about 2.8%, about 2.9%, about 3.0%, about 3.1%, about 3.2%, about 3.3%, about 3.4%, about 3.5%, about 3.6%, about 3.7%, about 3.8%, about 3.9%, about 4.0%, about 4.1%, about 4.2%, about 4.3%, about 4.4%, about 4.5%, about 4.6%, about 4.7%, about 4.8%, about 4.9%, or about 5.0% DMPE-PEG2000 or DMG-PEG by mole in the total composition. In some embodiments, the composition comprises about 1.5% DMPE-PEG2000 or DMG-PEG by mole.

[0846] In some embodiments, the lipid nanoparticle further comprises a sterol. In some embodiments, the sterol is cholesterol. In some embodiments, the composition comprises from about 10.0% to about 50.0% cholesterol by mole, or about 15.0% to about 40.0% cholesterol by mole. In some embodiments, the composition comprises about 10.0%, about 11.0%, about 11.5%, about 12.0%, about 12.5%, about 13.0%, about 13.5%, about 14.0%, about 14.5%, about 15.0%, about 15.5%, about 16.0%, about 16.5%, about 17.0%, about 17.5%, about 18.0%, about 18.5%, about 19.0%, about 19.5%, about 20.0%, about 20.5%, about 21.0%, about 21.5%, about 22.0%, about 22.5%, about 23.0%, about 23.5%, about 24.0%, about 24.5%, about 25.0%, about 25.5%, about 26.0%, about 26.5%, about 27.0%, about 27.5%, about 28.0%, about 28.5%, about 29.0%, about 29.5%, about 30.0%, about 30.5%, about 31.0%, about 31.5%, about 32.00, about 32.5%, about 33.0%, about 33.5%, about 34.0%, about 34.5%, about 35.0%, about 35.5%, about 36.0%, about 36.5%, about 37.0%, about 37.5%, about 38.0%, about 38.5%, about 39.0%, about 39.5% or about 40.0% cholesterol by mole. In some embodiments, the composition comprises about 38.5% cholesterol by mole.

[0847] The ratio of PEG in the LNP formulations can be increased or decreased and/or the carbon chain length of the PEG lipid can be modified from C14 to C18 to alter the pharmacokinetics and/or biodistribution of the LNP formulations.

[0848] In some embodiments, the lipid nanoparticles described herein further comprise one or more compounds that are capable of enhancing the cellular uptake or cytosolic distribution of the lipid nanoparticle and/or its encapsulated composition (e.g., gene silencing agent, siRNA molecule, peptide, etc.). Compounds that can enhance the cellular uptake can include levodopa, naphazoline hydrochloride, acetohexamide, niclosamide, diprophylline, and isoxicam, or a combination thereof. Compounds that can enhance the cytosolic distribution can include azaguanine-8, isoflupredone acetate, chloroquine, trimethobenzamide, hydrochloride, isoxsuprine hydrochloride, and diphemanil methylsulfate, or a combination thereof.

[0849] In some embodiments, the lipid nanoparticles comprise lipid bilayers encapsulating one or more agents encompassed by the present invention, such as siRNA molecules sufficiently complementary to the mRNA transcription product of at least one biomarker described herein. In some embodiments, the lipid nanoparticles are formulated to facilitate an uptake into cells. In some embodiments, the lipid nanoparticles are formulated to facilitate uptake into monocytes, dendritic cells, and/or macrophages.

[0850] The lipid nanoparticle can, in some aspects, further comprise additional agents. In some embodiments, the lipid nanoparticle further comprises one or more antioxidants. Without wishing to be bound by any particular theory, the antioxidant can help stabilize the lipid nanoparticle and prevent, decrease, and/or inhibit degradation of the cationic lipids and/or active agents encapsulated in the lipid nanoparticle. In some embodiments, the antioxidant is a hydrophilic antioxidant, a lipophilic antioxidant, a metal chelator, a primary antioxidant, a secondary antioxidant, or salts or mixtures thereof. In some embodiments, the antioxidant comprises EDTA, or a salt thereof. In some embodiments, the lipid nanoparticle further comprises EDTA in combination with one, two, three, four, five, six, seven, eight, or more additional antioxidants (e.g., primary antioxidants, secondary antioxidants, or other metal chelators). Examples of antioxidants include, but are not limited to, hydrophilic antioxidants, lipophilic antioxidants, and mixtures thereof. Non-limiting examples of hydrophilic antioxidants include chelating agents (e.g., metal chelators) such as ethylenediaminetetraacetic acid (EDTA), citrate, ethylene glycol tetraacetic acid (EGTA), 1,2-bis(o-aminophenoxy)ethane-N,N,N′,N′-tetraacetic acid (BAPTA), diethylene triamine pentaacetic acid (DTPA), 2,3-dimercapto-1-propanesulfonic acid (DMPS), dimercaptosuccinic acid (DMSA), cc-lipoic acid, salicylaldehyde isonicotinoyl hydrazone (SIR), hexyl thioethylamine hydrochloride (HTA), desferrioxamine, salts thereof, and mixtures thereof. Additional hydrophilic antioxidants include ascorbic acid, cysteine, glutathione, dihydrolipoic acid, 2-mercaptoethane sulfonic acid, 2-mercaptobenzimidazole sulfonic acid, 6-hydroxy-2,5,7,8-tetramethylchroman-2-carboxylic acid, sodium metabisulfite, salts thereof, and mixtures thereof. Non-limiting examples of lipophilic antioxidants include vitamin E isomers such as α-, β-, γ-, and δ-tocopherols and α-, β-, γ-, and δ-tocotrienols; polyphenols such as 2-tert-butyl-4-methyl phenol, 2-tert-butyl-5-methyl phenol, and 2-tert-butyl-6-methyl phenol; butylated hydroxyanisole (BHA) (e.g., 2-teri-butyl-4-hydroxyanisole and 3-tert-butyl-4-hydroxyanisole); butylhydroxytoluene (BHT); tert-butylhydroquinone (TBHQ); ascorbyl palmitate; rc-propyl gallate; salts thereof; and mixtures thereof.

[0851] In some embodiments, the lipid-based particles formulated for delivery of one or more agents (e.g., gene silencing agents, siRNA molecules, peptides) are selected from lipid vectors, liposomes, lipoplexes, lipid nanoparticles, and micelles. In some embodiments, the lipid-based particle is a pH-sensitive nanoparticle. Such pH-sensitive nanoparticles (PNSDS), which are positive-charge-free nanocarriers comprising siRNA chemically cross-linked with multi-armed poly(ethylene glycol) carriers via acid-labile acetal linkers, can be beneficial for the delivery of siRNA molecules (Tang et al., SiRNA Crosslinked Nanoparticles for the Treatment of Inflammation-induced Liver Injury, Advanced Science, 2016, 4(2), e1600228).

[0852] In some embodiments, the lipid nanoparticle further comprises one or more C12-200 aminoalcohol lipids. In some embodiments, the lipid nanoparticle comprises from about 40.0% to about 50.0% C12-200 by mole. In some embodiments, the lipid nanoparticle comprises from about 5.0% to about 10.0% DSPC by mole. In some embodiments, the lipid nanoparticle comprises from about 1.0% to about 2.0% DMG-PEG by mole. In some embodiments, the lipid nanoparticle comprises from about 20.0% to about 40.0% cholesterol by mole. In some embodiments, the lipid nanoparticle comprises 50% C12-200, 10.0% DSPC, 1.5% DMG-PEG, and 38.5% cholesterol by mole.

[0853] In some embodiments, the total siRNA molecule moles with respect to the total lipid moles within the formulation ranges from about 1:5 to about 1:20. In some embodiments, the total siRNA molecule moles with respect to the total lipid moles is about 1:5, about 1:6, about 1:7, about 1:8, about 1:9, about 1:10, about 1:11, about 1:12, about 1:13, about 1:14, about 1:15, about 1:16, about 1:17, about 1:18, about 1:18, about 1:19, or about 1:20. In some embodiments, the total siRNA molecule moles with respect to the total lipid moles is about 1:9.

[0854] In some embodiments, the lipid nanoparticle (LNP) is formulated to encapsulate an agent, such as an siRNA, using a spontaneous vesicle formation formulation procedure as previously described in Semple et al. (2010) Nat. Biotechnol. 28172-28176.

[0855] In some embodiments, the total concentration of one or more agents encompassed by the present invention, such as siRNA molecules that are sufficiently complementary to the mRNA transcription product of at least one biomarker described herein in the formulation is about 0.001 mg/ml to about 100 mg/ml, about 0.01 mg/ml to about 10 mg/ml, or about 0.1 mg/ml to about 20 mg/ml. In some embodiments, the total concentration of two or more, three or more, four or more, five or more, or all six siRNA molecules is about 0.001 mg/ml to about 100 mg/ml, about 0.01 mg/ml to about 10 mg/ml, or about 0.1 mg/ml to about 20 mg/ml.

[0856] In some embodiments, the lipid nanoparticles (LNPs) ranging in size from about 40 to about 200 nm, or from about 50 nm to about 100 nm. In some embodiments, the lipid nanoparticle is about 40 nm, about 45 nm, about 50 nm, about 55 nm, about 60 nm, about 65 nm, about 70 nm, about 75 nm, about 80 nm, about 85 nm, about 90 nm, about 95 nm, about 100 nm, about 110 nm, about 120 nm, about 130 nm, about 140 nm, about 150 nm, about 160 nm, about 170 nm, about 180 nm, or about 200 nm in size. In some embodiments, the lipid nanoparticle is about 80 nm in size.

[0857] In accordance with the present invention, the formulations as described herein are stable. The term “stable,” as used herein, means remaining in a state or condition that is suitable for administration to a patient. In some embodiments, the formulations are substantially pure. As used herein, “substantially pure” means that the active ingredient (e.g., the siRNA molecules sufficiently complementary to the mRNA transcription product of at least one biomarker described herein) is the predominant species present in the formulation. In some embodiments, a substantially pure composition comprises a composition that is more than 80% comprised of macromolecular species (e.g., active agents, gene silencing agents, siRNA molecules, additional agents (e.g., antioxidants)). In some embodiments, the substantially pure composition comprises a composition that is more than 85%, 90%0, 95%, 96%, 97%, 98%, or 99% comprised of macromolecular species. In some embodiments, the one or more active agents are purified to essential homogeneity (i.e., contaminant species cannot be detected in the composition by conventional detection methods), wherein the composition consists essentially of a single macromolecular species.

[0858] Other nanoparticles can be used as delivery vehicles of the agents and compositions described herein. In some embodiments, the nanoparticles comprises chemically and/or enzymatically modified lipoproteins (e.g., apolipoproteins as described in U.S. patent publication No. 2011/0256224). In some embodiments, the nanoparticles comprise other lipoprotein-based nanoparticles, such as HDL, HDL-like lipoprotein particles, or synthetic HDL-like particles (See, e.g., U.S. patent publication No. 2009/0110739; and U.S. Pat. No. 7,824,709).

[0859] In some embodiments, nanoparticles with increased macrophage targeted delivery are used to encapsulate a composition as described herein. In some embodiments, the nanoparticle is a GP nanoparticle comprising 1,3-D-glucan (Soto et al. (2012) J. Drug. Deliv. e143524), or a mannosylated chitosan (MCS) nanoparticle (Peng el al. (2015) J. Nanosci. Nanotechnol. 15:2619-2627).

[0860] The nanoparticle formulations can be a carbohydrate nanoparticle comprising a carbohydrate carrier. As a non-limiting example, the carbohydrate carrier can include, but is not limited to, an anhydride-modified phytoglycogen or glycogen-type material, phtoglycogen octenyl succinate, phytoglycogen beta-dextrin, anhydride-modified phytoglycogen beta-dextrin. (see, e.g., PCT Publ. No. WO 2012/109121).

[0861] In some embodiments, lipid nanoparticles can be engineered to alter the surface properties of particles so the lipid nanoparticles can penetrate the mucosal barrier. Mucus is located on mucosal tissue such as, but not limited to, oral (e.g., the buccal and esophageal membranes and tonsil tissue), ophthalmic, gastrointestinal (e.g., stomach, small intestine, large intestine, colon, rectum), nasal, respiratory (e.g., nasal, pharyngeal, tracheal and bronchial membranes), genital (e.g., vaginal, cervical and urethral membranes). Nanoparticles larger than 10-200 nm which are preferred for higher drug encapsulation efficiency and the ability to provide the sustained delivery of a wide array of drugs have been thought to be too large to rapidly diffuse through mucosal barriers. Mucus is continuously secreted, shed, discarded or digested and recycled so most of the trapped particles can be removed from the mucosa tissue within seconds or within a few hours. Large polymeric nanoparticles (200 nm-500 nm in diameter) which have been coated densely with a low molecular weight polyethylene glycol (PEG) diffused through mucus only 4 to 6-fold lower than the same particles diffusing in water (Lai et al. (2007) Proc. Natl. Acad. Sci. U.S.A. 104:1482-1487; Lai et al. (2009) Adv Drug Deliv Rev. 61:158-171). The transport of nanoparticles can be determined using rates of permeation and/or fluorescent microscopy techniques including, but not limited to, fluorescence recovery after photo bleaching (FRAP) and high resolution multiple particle tracking (MPT). As a non-limiting example, compositions which can penetrate a mucosal barrier can be made as described in U.S. Pat. No. 8,241,670.

[0862] Lipid nanoparticle engineered to penetrate mucus can comprise a polymeric material (i.e., a polymeric core) and/or a polymer-vitamin conjugate and/or a tri-block co-polymer. The polymeric material can include, but is not limited to, polyamines, polyethers, polyamides, polyesters, polycarbamates, polyureas, polycarbonates, poly(styrenes), polyimides, polysulfones, polyurethanes, polyacetylenes, polyethylenes, polyethyeneimines, polyisocyanates, polyacrylates, polymethacrylates, polyacrylonitriles, and polyarylates. The polymeric material can be biodegradable and/or biocompatible. The polymeric material can additionally be irradiated. As a non-limiting example, the polymeric material can be gamma irradiated (see, e.g., PCT Publ. No. WO 2012/082165). Non-limiting examples of specific polymers include poly(caprolactone) (PCL), ethylene vinyl acetate polymer (EVA), poly(lactic acid) (PLA), poly(L-lactic acid) (PLLA), poly(glycolic acid)(PGA), poly(lactic acid-co-glycolic acid)(PLGA), poly(L-lactic acid-co-glycolic acid) (PLLGA), poly(D,L-lactide) (PDLA), poly(L-lactide) (PLLA), poly(D,L-lactide-co-caprolactone), poly(D,L-lactide-co-caprolactone-co-glycolide), poly(D,L-lactide-co-PEO-co-D,L-lactide), poly(D,L-lactide-co-PPO-co-D,L-lactide), polyalkyl cyanoacralate, polyurethane, poly-L-lysine (PLL), hydroxypropyl methacrylate (HPMA), polyethyleneglycol, poly-L-glutamic acid, poly(hydroxy acids), polyanhydrides, polyorthoesters, poly(ester amides), polyamides, poly(ester ethers), polycarbonates, polyalkylenes such as polyethylene and polypropylene, polyalkylene glycols such as poly(ethylene glycol) (PEG), polyalkylene oxides (PEO), polyalkylene terephthalates such as poly(ethylene terephthalate), polyvinyl alcohols (PVA), polyvinyl ethers, polyvinyl esters such as poly(vinyl acetate), polyvinyl halides such as poly(vinyl chloride) (PVC), polyvinylpyrrolidone, polysiloxanes, polystyrene (PS), polyurethanes, derivatized celluloses such as alkyl celluloses, hydroxyalkyl celluloses, cellulose ethers, cellulose esters, nitro celluloses, hydroxypropylcellulose, carboxymethylcellulose, polymers of acrylic acids, such as poly(methyl(meth)acrylate) (PMMA), poly(ethyl(meth)acrylate), poly(butyl(meth)acrylate), poly(isobutyl(meth)acrylate), poly(hexyl(meth)acrylate), poly(isodecyl(meth)acrylate), poly(lauryl(meth)acrylate), poly(phenyl(meth)acrylate), poly(methyl acrylate), poly(isopropyl acrylate), poly(isobutyl acrylate), poly(octadecyl acrylate) and copolymers and mixtures thereof, polydioxanone and its copolymers, polyhydroxyalkanoates, polypropylene fumarate, polyoxymethylene, poloxamers, poly(ortho)esters, poly(butyric acid), poly(valeric acid), poly(lactide-co-caprolactone), and trimethylene carbonate, polyvinylpyrrolidone. The lipid nanoparticle can be coated or associated with a co-polymer such as, but not limited to, a block co-polymer, and (poly(ethylene glycol))-(poly(propylene oxide))-(poly(ethylene glycol)) triblock copolymer (see, e.g., U.S. Pat. Publ. Numbers 2012/0121718 and 2010/0003337; and U.S. Pat. No. 8,263,665). The co-polymer can be a polymer that is generally regarded as safe (GRAS) and the formation of the lipid nanoparticle can be in such a way that no new chemical entities are created. For example, the lipid nanoparticle can comprise poloxamers coating PLGA nanoparticles without forming new chemical entities which are still able to rapidly penetrate human mucus (Yang et al. (2011) Angew. Chem. Int. Ed. 50:2597-2600).

[0863] For example, LNPs encompassed by the present invention can comprise a PLGA-PEG block copolymer (see, e.g., U.S. Pat. Publ. No. 2012/0004293 and U.S. Pat. No. 8,236,330); a diblock copolymer of PEG and PLA or PEG and PLGA (see, e.g., U.S. Pat. No. 8,246,968); a multiblock copolymer (see, e.g., U.S. Pat. Nos. 8,263,665 and 8,287,910); a polyion complex comprising a non-polymeric micelle and the block copolymer (see, e.g., U.S. Pat. Publ. No. 2012/00768); or amine-containing polymer such as, but not limited to polylysine, polyethylene imine, poly(amidoamine) dendrimers, poly(beta-amino esters) (see, e.g., U.S. Pat. No. 8,287,849).

[0864] LNPs encompassed by the present invention can comprise one or more other polymer such as acrylic polymers. Acrylic polymers can include but are not limited to, acrylic acid, methacrylic acid and methacrylic acid copolymersx, methyl methacrylate copolymers, ethoxyethyl methacrylates, cyanoethyl methacrylate, amino alkyl methacrylate copolymer, poly(acrylic acid), poly(methacrylic acid), polycyanoacrylates and combinations thereof.

[0865] LNPs encompassed by the present invention can comprise at least one degradable polyester which can contain polycationic side chains. Degradable polyesters include, but are not limited to, poly(serine ester), poly(L-lactide-co-L-lysine), poly(4-hydroxy-L-proline ester), and combinations thereof. In another embodiment, the degradable polyesters can include a PEG conjugation to form a PEGylated polymer. The LNPs can further include at least one targeting ligand. The targeting ligand can be any ligand known in the art such as, but not limited to, a monoclonal antibody (Kirpotin et al. (2006) Cancer Res. 66:6732-6740).

[0866] In some embodiments, compositions encompassed by the present invention can be formulated as a solid lipid nanoparticle. A solid lipid nanoparticle (SLN) can be spherical with an average diameter between 10 to 1000 nm. SLN possess a solid lipid core matrix that can solubilize lipophilic molecules and can be stabilized with surfactants and/or emulsifiers. In a further embodiment, the lipid nanoparticle can be a self-assembly lipid-polymer nanoparticle (see, e.g., Zhang el al. (2008) ACS Nano 2:1696-1702).

[0867] In some embodiments, agents encompassed by the present invention can be sustained release formulations, such as encapsulated into a nanoparticle or a rapidly eliminated nanoparticle and the nanoparticles or a rapidly eliminated nanoparticle can then be encapsulated into a polymer, hydrogel and/or surgical sealant described herein and/or known in the art. As a non-limiting example, the polymer, hydrogel or surgical sealant can be PLGA, ethylene vinyl acetate (EVAc), poloxamer, GELSITE® (Nanotherapeutics, Inc. Alachua, Fla.), HYLENEX® (Halozyme Therapeutics, San Diego Calif.), surgical sealants such as fibrinogen polymers (Ethicon Inc. Cornelia, Ga.), TISSELL® (Baxter International, Inc Deerfield, Ill.), PEG-based sealants, and COSEAL® (Baxter International, Inc Deerfield, Ill.). In another embodiment, the nanoparticle can be encapsulated into any polymer known in the art which can form a gel when injected into a subject. As a non-limiting example, the nanoparticle can be encapsulated into a polymer matrix which can be biodegradable.

[0868] In some embodiments, compositions encompassed by the present invention can be formulated as controlled release nanoparticles. In one example, the nanoparticle formulation for controlled release and/or targeted delivery can further include at least one controlled release coating. Controlled release coatings include, but are not limited to, OPADRY®, polyvinylpyrrolidone/vinyl acetate copolymer, polyvinylpyrrolidone, hydroxypropyl methylcellulose, hydroxypropyl cellulose, hydroxyethyl cellulose, EUDRAGIT RL®, EUDRAGIT RS® and cellulose derivatives such as ethylcellulose aqueous dispersions (AQUACOAT® and SURELEASE®). In another example, the controlled release and/or targeted delivery formulation can comprise at least one degradable polyester which can contain polycationic side chains. Degradable polyesters include, but are not limited to, poly(serine ester), poly(L-lactide-co-L-lysine), poly(4-hydroxy-L-proline ester), and combinations thereof.

[0869] In another embodiment, the degradable polyesters can include a PEG conjugation to form a PEGylated polymer.

[0870] In some embodiments, compositions encompassed by the present invention can be formulated as a lipoplex, such as, without limitation, the ATUPLEX™ system, the DACC system, the DBTC system and other conjugate-lipoplex technology from Silence Therapeutics (London, United Kingdom), STEMFECT™ from STEMGENT® (Cambridge, Mass.), and polyethylenimine (PEI) or protamine-based targeted and non-targeted delivery of therapeutic agents (Aleku et al. (2008) Cancer Res. 68: 9788-9798; Strumberg et al. (2012) Int. J. Clin. Pharmacol. Ther. (2012) 50:76-78; Santel et al. (2006) Gene Ther. 13:1222-1234; Santel et al. (2006) Gene Ther. 13:1360-1370; Gutbier et al. (2010) Pulm. Pharmacol. Ther. 23:334-344; Kaufmann et al. (2010) Microvasc. Res. 80:286-293; Weide et al. (2009) J. Immunother. 32:498-507; Weide et al. (2008) J. Immunother. 31:180-188; Pascolo (2004) Fxp. Opin. Biol. Ther. 4:1285-1294; Fotin-Mleczek et al. (2011) J. Immunother. 34:1-15; Song et al. (2005) Nature Biotechnol. 23:709-717; Peer et al. (2007) Proc. Natl. Acad. Sci. U.S.A. 6:4095-4100; and deFougerolles (2008) Hum. Gene Ther. 19:125-132).

[0871] In some embodiments, therapeutic agents and compositions encompassed by the present invention can be encapsulated in, linked to and/or associated with synthetic nanocarriers. Synthetic nanocarriers include, but are not limited to, those described in International Pub. Nos. WO 2010/005740, WO 2010/030763, WO 2012/13501, WO 2012/149252, WO 2012/149255, WO 2012/149259, WO 2012/149265, WO 2012/149268, WO 2012/149282, WO 2012/149301, WO 2012/149393, WO 2012/149405, WO 2012/149411, and WO 2012/149454, and U.S. Pat. Publ. Numbers 2011/0262491, 2010/0104645, 2010/0087337, and 2012/0244222. In another embodiment, the synthetic nanocarrier formulations can be lyophilized, such as by methods described in PCT Publ. No. WO 2011/072218 and U.S. Pat. No. 8,211,473.

[0872] In some embodiments, the synthetic nanocarriers can contain reactive groups to release the conjugates described herein (see, e.g., PCT Publ. No. WO 2012/0952552 and U.S. Pat. Publ. No. 2012/0171229). In one embodiment, the synthetic nanocarriers can be formulated for targeted release. In one embodiment, the synthetic nanocarrier is formulated to release the therapeutic agents at a specified pH and/or after a desired time interval. As a non-limiting example, the synthetic nanoparticle can be formulated to release the conjugates after 24 hours and/or at a pH of 4.5 (see, e.g., PCT Publ. Numbers WO 2010/138193 and WO 2010/138194 and U.S. Pat. Publ. Numbers 2011/0020388 and 2011/0027217). In some embodiments, the synthetic nanocarriers can be formulated for controlled and/or sustained release of conjugates described herein. As a non-limiting example, the synthetic nanocarriers for sustained release can be formulated by methods known in the art, described herein and/or as described in PCT Publ. No. WO 2010/138192 and U.S. Pat. Publ. No. 2010/0303850.

[0873] In some embodiments, the nanoparticle can be optimized for oral administration. The nanoparticle can comprise at least one cationic biopolymer such as, but not limited to, chitosan or a derivative thereof. As a non-limiting example, the nanoparticle can be formulated by the methods described in U.S. Pat. Publ. No. 20120282343.

[0874] In some embodiments, agents encompassed by the present invention can also be formulated using natural and/or synthetic polymers. Non-limiting examples of polymers which can be used for drug delivery include, but are not limited to, DYNAMIC POLYCONJUGATE® (Arrowhead Research Corp., Pasadena, Calif.) formulations from MIRUS® Bio (Madison, Wis.) and Roche Madison (Madison, Wis.), PHASERX™ polymer formulations such as, without limitation, SMARTT POLYMER TECHNOLOGY™ (Seattle, Wash.), DMRI/DOPE, poloxamer, VAXFECTIN® adjuvant from Vical (San Diego, Calif.), chitosan, cyclodextrin from Calando Pharmaceuticals (Pasadena, Calif.), dendrimers and poly(lactic-co-glycolic acid) (PLGA) polymers, RONDEL™ (RNAi/Oligonucleotide Nanoparticle Delivery) polymers (Arrowhead Research Corporation, Pasadena, Calif.) and pH responsive co-block polymers such as, but not limited to, PHASERX™ (Seattle, Wash.). For example, agents and compositions encompassed by the present invention can be formulated in a pharmaceutical compound including a poly(alkylene imine), a biodegradable cationic lipopolymer, a biodegradable block copolymer, a biodegradable polymer, or a biodegradable random copolymer, a biodegradable polyester block copolymer, a biodegradable polyester polymer, a biodegradable polyester random copolymer, a linear biodegradable copolymer, PAGA, a biodegradable cross-linked cationic multi-block copolymer or combinations thereof.

[0875] The polymers used in the present invention can have undergone processing to reduce and/or inhibit the attachment of unwanted substances such as, but not limited to, bacteria, to the surface of the polymer. The polymer can be processed by methods known and/or described in the art and/or described in PCT Publ. No. WO 2011/50467.

[0876] Nanoparticles can contain one or more polymers. Polymers can contain one more of the following polyesters: homopolymers including glycolic acid units, referred to herein as “PGA,” and lactic acid units, such as poly-L-lactic acid, poly-D-lactic acid, poly-D,L-lactic acid, poly-L-lactide, poly-D-lactide, and poly-D,L-lactide, collectively referred to herein as “PLA,” and caprolactone units, such as poly(ε-caprolactone), collectively referred to herein as “PCL,” and copolymers including lactic acid and glycolic acid units, such as various forms of poly(lactic acid-co-glycolic acid) and poly(lactide-co-glycolide) characterized by the ratio of lactic acid:glycolic acid, collectively referred to herein as “PLGA,” and polyacrylates, and derivatives thereof. Exemplary polymers also include copolymers of polyethylene glycol (PEG) and the aforementioned polyesters, such as various forms of PLGA-PEG or PLA-PEG copolymers, collectively referred to herein as “PEGylated polymers.” In certain embodiments, the PEG region can be covalently associated with polymer to yield “PEGylated polymers” by a cleavable linker.

[0877] The nanoparticles can contain one or more hydrophilic polymers. Hydrophilic polymers include cellulosic polymers such as starch and polysaccharides; hydrophilic polypeptides; poly(amino acids) such as poly-L-glutamic acid (PGS), gamma-polyglutamic acid, poly-L-aspartic acid, poly-L-serine, or poly-L-lysine; polyalkylene glycols and polyalkylene oxides such as polyethylene glycol (PEG), polypropylene glycol (PPG), and poly(ethylene oxide) (PEO); poly(oxyethylated polyol); poly(olefinic alcohol); polyvinylpyrrolidone); poly(hydroxyalkylmethacrylamide); poly(hydroxyalkylmethacrylate); poly(saccharides); poly(hydroxy acids); poly(vinyl alcohol); polyoxazoline; and copolymers thereof.

[0878] The nanoparticles can contain one or more hydrophobic polymers. Examples of suitable hydrophobic polymers include polyhydroxyacids such as poly(lactic acid), poly(glycolic acid), and poly(lactic acid-co-glycolic acids); polyhydroxyalkanoates such as poly3-hydroxybutyrate or poly4-hydroxybutyrate; polycaprolactones; poly(orthoesters); polyanhydrides; poly(phosphazenes); poly(lactide-co-caprolactones); polycarbonates such as tyrosine polycarbonates; polyamides (including synthetic and natural polyamides), polypeptides, and poly(amino acids); polyesteramides; polyesters; poly(dioxanones); poly(alkylene alkylates); hydrophobic polyethers; polyurethanes; polyetheresters; polyacetals; polycyanoacrylates; polyacrylates; polymethylmethacrylates; polysiloxanes; poly(oxyethylene)/poly(oxypropylene) copolymers; polyketals; polyphosphates; polyhydroxyvalerates; polyalkylene oxalates; polyalkylene succinates; poly(maleic acids), as well as copolymers thereof.

[0879] In certain embodiments, the hydrophobic polymer is an aliphatic polyester. In some embodiments, the hydrophobic polymer is poly(lactic acid), poly(glycolic acid), or poly(lactic acid-co-glycolic acid).

[0880] The nanoparticles can contain one or more amphiphilic polymers. Amphiphilic polymers can be polymers containing a hydrophobic polymer block and a hydrophilic polymer block. The hydrophobic polymer block can contain one or more of the hydrophobic polymers above or a derivative or copolymer thereof. The hydrophilic polymer block can contain one or more of the hydrophilic polymers above or a derivative or copolymer thereof. In some embodiments the amphiphilic polymer is a di-block polymer containing a hydrophobic end formed from a hydrophobic polymer and a hydrophilic end formed of a hydrophilic polymer. In some embodiments, a moiety can be attached to the hydrophobic end, to the hydrophilic end, or both. The particle can contain two or more amphiphilic polymers.

[0881] The polymer can also include but is not limited to, polyethenes, polyethylene glycol (PEG), poly(l-lysine) (PLL), PEG grafted to PLL, cationic lipopolymer, biodegradable cationic lipopolymer, polyethylenimine (PEI), cross-linked branched poly(alkylene imines), a polyamine derivative, a modified poloxamer, a biodegradable polymer, elastic biodegradable polymer, biodegradable block copolymer, biodegradable random copolymer, biodegradable polyester copolymer, biodegradable polyester block copolymer, biodegradable polyester block random copolymer, multiblock copolymers, linear biodegradable copolymer, poly[α-(4-aminobutyl)-L-glycolic acid) (PAGA), biodegradable cross-linked cationic multi-block copolymers, polycarbonates, polyanhydrides, polyhydroxyacids, polypropylfumerates, polycaprolactones, polyamides, polyacetals, polyethers, polyesters, poly(orthoesters), polycyanoacrylates, polyvinyl alcohols, polyurethanes, polyphosphazenes, polyacrylates, polymethacrylates, polycyanoacrylates, polyureas, polystyrenes, polyamines, polylysine, poly(ethylene imine), poly(serine ester), poly(L-lactide-co-L-lysine), poly(4-hydroxy-L-proline ester), acrylic polymers, amine-containing polymers, dextran polymers, dextran polymer derivatives or combinations thereof.

[0882] The polymers can be a cross linkable polyester. Cross linkable polyesters include those known in the art and described in U.S. Pat. Publ. No. 2012/0269761.

[0883] The nanoparticles can contain one or more biodegradable polymers. Biodegradable polymers can include polymers that are insoluble or sparingly soluble in water that are converted chemically or enzymatically in the body into water-soluble materials. Biodegradable polymers can include soluble polymers crosslinked by hydolyzable cross-linking groups to render the crosslinked polymer insoluble or sparingly soluble in water.

[0884] Biodegradable polymers can include polyamides, polycarbonates, polyalkylenes, polyalkylene glycols, polyalkylene oxides, polyalkylene terepthalates, polyvinyl alcohols, polyvinyl ethers, polyvinyl esters, polyvinyl halides, polyvinylpyrrolidone, polyglycolides, polysiloxanes, polyurethanes and copolymers thereof, alkyl cellulose such as methyl cellulose and ethyl cellulose, hydroxyalkyl celluloses such as hydroxypropyl cellulose, hydroxy-propyl methyl cellulose, and hydroxybutyl methyl cellulose, cellulose ethers, cellulose esters, nitro celluloses, cellulose acetate, cellulose propionate, cellulose acetate butyrate, cellulose acetate phthalate, carboxylethyl cellulose, cellulose triacetate, cellulose sulphate sodium salt, polymers of acrylic and methacrylic esters such as poly (methyl methacrylate), poly(ethylmethacrylate), poly(butylmethacrylate), poly(isobutylmethacrylate), poly(hexlmethacrylate), poly(isodecylmethacrylate), poly(lauryl methacrylate), poly (phenyl methacrylate), poly(methyl acrylate), poly(isopropyl acrylate), poly(isobutyl acrylate), poly(octadecyl acrylate), polyethylene, polypropylene poly(ethylene glycol), poly(ethylene oxide), poly(ethylene terephthalate), poly(vinyl alcohols), poly(vinyl acetate, poly vinyl chloride polystyrene and polyvinylpryrrolidone, derivatives thereof, linear and branched copolymers and block copolymers thereof, and blends thereof. Exemplary biodegradable polymers include polyesters, poly(ortho esters), poly(ethylene imines), poly(caprolactones), poly(hydroxyalkanoates), poly(hydroxyvalerates), polyanhydrides, poly(acrylic acids), polyglycolides, poly(urethanes), polycarbonates, polyphosphate esters, polyphosphazenes, derivatives thereof, linear and branched copolymers and block copolymers thereof, and blends thereof. In some embodiments the particle contains biodegradable polyesters or polyanhydrides such as poly(lactic acid), poly(glycolic acid), and poly(lactic-co-glycolic acid).

[0885] Degradable polyesters can contain polycationic side chains. Degradable polyesters include, but are not limited to, poly(serine ester), poly(L-lactide-co-L-lysine), poly(4-hydroxy-L-proline ester), and combinations thereof. In another embodiment, the degradable polyesters can include a PEG conjugation to form a PEGylated polymer.

[0886] The biodegradable cationic lipopolymer can be made by methods known in the art, such as those described in U.S. Pat. No. 6,696,038 and U.S. Pat Publ. Numbers 2003/0073619 and 2004/0142474. The poly(alkylene imine) can be made using methods known in the art, such as those described in U.S. Pat. Publ. No. 2010/0004315. The biodegradable polymer, biodegradable block copolymer, the biodegradable random copolymer, biodegradable polyester block copolymer, biodegradable polyester polymer, or biodegradable polyester random copolymer can be made using methods known in the art, such as those described in U.S. Pat. Nos. 6,517,869 and 6,267,987. The linear biodegradable copolymer can be made using methods known in the art, such as those described in U.S. Pat. No. 6,652,886. The PAGA polymer can be made using methods known in the art, such as those described in U.S. Pat. No. 6,217,912. The PAGA polymer can be copolymerized to form a copolymer or block copolymer with polymers such as but not limited to, poly-L-lysine, polyarginine, polyornithine, histones, avidin, protamines, polylactides and poly(lactide-co-glycolides). The biodegradable cross-linked cationic multi-block copolymers can be made using methods known in the art, such as those described in U.S. Pat. No. 8,057,821 and U.S. Pat. Publ. No. 2012/009145. For example, the multi-block copolymers can be synthesized using linear polyethylenimine (LPEI) blocks which have distinct patterns as compared to branched polyethyleneimines.

[0887] The polymers described herein can be conjugated to a lipid-terminating PEG. As a non-limiting example, PLGA can be conjugated to a lipid-terminating PEG forming PLGA-DSPE-PEG. As another non-limiting example, PEG conjugates for use according to the present invention are described in PCT Publ. No. WO 2008/103276. The polymers can be conjugated using a ligand conjugate such as, but not limited to, conjugates described in U.S. Pat. No. 8,273,363.

[0888] Polymer nanoparticles can also comprise chitosan. The chitosan formulation includes a core of positively charged chitosan and an outer portion of negatively charged substrate (see, e.g., U.S. Pat. Publ. No. 2012/0258176). Chitosan includes, but is not limited to N-trimethyl chitosan, mono-N-carboxymethyl chitosan (MCC), N-palmitoyl chitosan (NPCS), EDTA-chitosan, low molecular weight chitosan, chitosan derivatives, or combinations thereof.

[0889] Polymer nanoparticles can also comprise PLGA. The PLGA formulations can include, but are not limited to, PLGA injectable depots (e.g., ELIGARD® which is formed by dissolving PLGA in 66% N-methyl-2-pyrrolidone (NMP) and the remainder being aqueous solvent and leuprolide. Once injected, the PLGA and leuprolide peptide precipitates into the subcutaneous space. In other examples, PLGA microspheres can be formulated by preparing the PLGA microspheres with tunable release rates (e.g., days and weeks) and encapsulating the active agents in the PLGA microspheres while maintaining the integrity of the agent during the encapsulation process.

[0890] In some embodiments, Evac, which are non-biodegradable, biocompatible polymers used extensively in pre-clinical sustained release implant applications (e.g., extended release products Ocusert a pilocarpine ophthalmic insert for glaucoma or progestasert a sustained release progesterone intrauterine device; transdermal delivery systems Testoderm, Duragesic and Selegiline; and catheters), can be used. Poloxamer F-407 NF is a hydrophilic, non-ionic surfactant triblock copolymer of polyoxyethylene-polyoxypropylene-polyoxyethylene having a low viscosity at temperatures less than 5° C. and forms a solid gel at temperatures greater than 15° C. PEG-based surgical sealants comprise two synthetic PEG components mixed in a delivery device which can be prepared in one minute, seals in 3 minutes and is reabsorbed within 30 days. GELSITE® and natural polymers are capable of in-situ gelation at the site of administration. They have been shown to interact with protein and peptide therapeutic candidates through ionic interaction to provide a stabilizing effect.

[0891] Other representative examples of polymer nanoparticles useful according to the present invention include the polymeric compound of PEG grafted with PLL as described in U.S. Pat. No. 6,177,274, as well as suspensions in a solution or medium with a cationic polymer, in a dry pharmaceutical composition or in a solution that is capable of being dried as described in U.S. Pat. Publ. Numbers 2009/0042829 and 2009/0042825.

[0892] A polyamine derivative can be used to deliver therapeutic agents and compositions encompassed by the present invention or to treat and/or prevent a disease or to be included in an implantable or injectable device (U.S. Pat. Pubi. No. 2010/0260817). As a non-limiting example the agents encompassed by the present invention can be delivered using a polyamide polymer comprising a 1,3-dipolar addition polymer prepared by combining a carbohydrate diazide monomer with a dilkyne unite comprising oligoamines (U.S. Pat. No. 8,236,280).

[0893] Other polymers can include acrylic polymers, such as acrylic acid, methacrylic acid, acrylic acid and methacrylic acid copolymers, methyl methacrylate copolymers, ethoxyethyl methacrylates, cyanoethyl methacrylate, amino alkyl methacrylate copolymer, poly(acrylic acid), poly(methacrylic acid), polycyanoacrylates and combinations thereof; or amine-containing polymers such as, but not limited to polylysine, polyethylene imine, poly(amidoamine) dendrimers or combinations thereof; or a PEG-charge-conversional polymer (Pitella et al. (2011) Biomat. 32:3106-3114).

[0894] Polymer nanoparticle can further comprise a diblock copolymer. In one embodiment, the diblock copolymer can include PEG in combination with a polymer such as, but not limited to, polyethylenes, polycarbonates, polyanhydrides, polyhydroxyacids, polypropylfumerates, polycaprolactones, polyamides, polyacetals, polyethers, polyesters, poly(orthoesters), polycyanoacrylates, polyvinyl alcohols, polyurethanes, polyphosphazenes, polyacrylates, polymethacrylates, polycyanoacrylates, polyureas, polystyrenes, polyamines, polylysine, poly(ethylene imine), poly(serine ester), poly(L-lactide-co-L-lysine), poly(4-hydroxy-L-proline ester) or combinations thereof. In some embodiments, agents encompassed by the present invention can be formulated with a PLGA-PEG block copolymer (see, e.g., U.S. Pat. Publ. No. US 2012/0004293 and U.S. Pat. No. 8,236,330) or PLGA-PEG-PLGA block copolymers (see, e.g., U.S. Pat. No. 6,004,573). As a non-limiting example, the agents encompassed by the present invention can be formulated with a diblock copolymer of PEG and PLA or PEG and PLGA (see, e.g., U.S. Pat. No. 8,246,968).

[0895] In some embodiments, polymer nanoparticles can comprise a plurality of polymers such as, but not limited to hydrophilic-hydrophobic polymers (e.g., PEG-PLGA), hydrophobic polymers (e.g., PEG) and/or hydrophilic polymers (see, e.g., PCT Publ. No. WO 2012/0225129).

[0896] In some embodiments, polymer nanoparticles can be formulated as therapeutic nanoparticles. Therapeutic nanoparticles can be formulated by methods and polymers described herein and known in the art such as, but not limited to, PCT Publ. Numbers WO 2010/005740, WO 2010/030763, WO 2010/005721, WO 2010/005723, and WO 2012/054923, and U.S. Pat. Publ. Numbers 2011/0262491, 2010/0104645, 2010/0087337, 2010/0068285, 2011/0274759, 2010/0068286, and 2012/0288541, and U.S. Pat. Nos. 8,206,747; 8,293,276; 8,318,208; and 8,318,211. In some embodiments, therapeutic polymer nanoparticles can be identified by the methods described in U.S. Pat. Publ. No. 2012/0140790.

[0897] Polymer formulations can also be selectively targeted through expression of different ligands as exemplified by, but not limited by, folate, transferrin, and N-acetylgalactosamine (GalNAc) (Benoit et al. (2011) Biomacromol. 12:2708-2714; Rozema et al. (2007) Proc. Natl. Acad. Sci. U.S.A. 104:12982-12887; Davis (2009) Mol. Pharm. 6:659-668; Davis (2010) Nature 464:1067-1070).

[0898] In some embodiments, the polymer formulation encompassed by the present invention can be stabilized by contacting the polymer formulation, which can include a cationic carrier, with a cationic lipopolymer which can be covalently linked to cholesterol and polyethylene glycol groups. The polymer formulation can be contacted with a cationic lipopolymer using the methods described in U.S. Pat. Publ. No. 2009/0042829. The cationic carrier can include, but is not limited to, polyethylenimine, poly(trimethylenimine), poly(tetramethylenimine), polypropylenimine, aminoglycoside-polyamine, dideoxy-diamino-b-cyclodextrin, spermine, spermidine, poly(2-dimethylamino)ethyl methacrylate, poly(lysine), poly(histidine), poly(arginine), cationized gelatin, dendrimers, chitosan, 1,2-Dioleoyl-3-Trimethylammonium-Propane (DOTAP), N-[1-(2,3-dioleoyloxy)propyl]-N,N,N-trimethylammonium chloride (DOTMA), 1-[2-(oleoyloxy)ethyl]-2-oleyl-3-(2-hydroxyethyl)imidazolinium chloride (DOTIM), 2,3-dioleyloxy-N-[2(sperminecarboxamido)ethyl]-N,N-dimethyl-1-propanaminium trifluoroacetate (DOSPA), 3B—[N—(N′,N′-Dimethylaminoethane)-carbamoyl]Cholesterol Hydrochloride (DC-Cholesterol HCl) diheptadecylamidoglycyl spermidine (DOGS), N,N-distearyl-N,N-dimethylammonium bromide (DDAB), N-(1,2-dimyristyloxyprop-3-yl)-N,N-dimethyl-N-hydroxyethyl ammonium bromide (DMRIE), N,N-dioleyl-N,N-dimethylammonium chloride DODAC) and combinations thereof.

[0899] The conjugates encompassed by the present invention can be formulated in a polyplex of one or more polymers (see, e.g., U.S. Pat. Publ. Numbers 2012/0237565 and 2012/0270927). In one embodiment, the polyplex comprises two or more cationic polymers. The catioinic polymer can comprise a poly(ethylene imine) (PEI), such as linear PEI.

[0900] In some embodiments, other forms of nanoparticles can be used.

[0901] For example, agents and compositions encompassed by the present invention can be formulated as a nanoparticle using a combination of polymers, lipids, and/or other biodegradable agents, such as, but not limited to, calcium phosphate. Components can be combined in a core-shell, hybrid, and/or layer-by-layer architecture, to allow for fine-tuning of the nanoparticle so that delivery of the composition encompassed by the present invention. Biodegradable calcium phosphate nanoparticles in combination with lipids and/or polymers have been shown to deliver therapeutic agents in vivo. In one embodiment, a lipid coated calcium phosphate nanoparticle, which can also contain a targeting ligand such as anisamide, can be used to deliver the composition encompassed by the present invention (see, e.g., Li et al. (2010)J. Contr. Rel. 142:416-421; Li et al. (2012) J. Contr. Rel. 158:108-114; Yang et al. (2012) Mol. Ther. 20:609-615). This delivery system combines both a targeted nanoparticle and a component to enhance the endosomal escape, calcium phosphate, in order to improve delivery of the agent.

[0902] In some embodiments, the particles can be hydrophobic ion-pairing complexes or hydrophobic ioin-pairs formed by one or more conjugates described above and counterions.

[0903] In some embodiments, core-shell nanoparticles can be used for pharmaceutical formulations. The use of core-shell nanoparticles has additionally focused on a high-throughput approach to synthesize cationic cross-linked nanogel cores and various shells (Siegwart et al. (2011) Proc. Natl. Acad. Sci. U.S.A. 108:12996-13001). The complexation, delivery, and internalization of the polymeric nanoparticles can be precisely controlled by altering the chemical composition in both the core and shell components of the nanoparticle. For example, the core-shell nanoparticles can efficiently deliver a therapeutic agent to mouse hepatocytes after they covalently attach cholesterol to the nanoparticle. Core-shell nanoparticles for use with the composition encompassed by the present invention are described and can be formed by the methods described in U.S. Pat. No. 8,313,777.

[0904] Inorganic nanoparticles exhibit a combination of physical, chemical, optical and electronic properties and provide a highly multifunctional platform to image and diagnose diseases, to selectively deliver therapeutic agents, and to sensitive cells and tissues to treatment regiments. Not wishing to be bound to any theory, enhanced permeability and retention (EPR) effect of inorganic nanoparticle provides a basis for the selective accumulation of many high-molecular-weight drugs. Circulating inorganic nanoparticles preferentially accumulate at tumor sites and in inflamed tissues (Yuan et al. (1995) Cancer Res. 55:3752-3756) and remain lodged due to their low diffusivity (Pluen et al. (2001) Proc. Natl. Acad. Sci. U.S.A. 98:4628-4633. The size of the inorganic nanoparticles can be nm-500 nm, 10 nm-100 nm, or 100 nm-500 nm. The inorganic nanoparticles can comprise metal (gold, iron, silver, copper, nickel, etc.), oxides (ZnO, TiO₂, Al₂O₃, SiO₂, iron oxide, copper oxide, nickel oxide, etc.), or semiconductor (CdS, CdSe, etc.). The inorganic nanoparticles can also be perfluorocarbon or FeCo.

[0905] Inorganic nanoparticles have high surface area per unit volume. Therefore, they can be loaded with therapeutic drugs and imaging agents at high densitives. A variety of methods can be used to load therapeutic drugs into/onto the inorganic nanoparticles, including but not limited to, colvalent bonds, electrostatic interactions, entrapment, and encapsulation. In addition to therapeutic agent drug loads, the inorganic nanoparticles can be funcationalized with targeting moieties, such as tumor-targeting ligands, on the surface. Formulating therapeutic agents with inorganic nanoparticles allows imaging, detection and monitoring of the therapeutic agents.

[0906] In some embodiments, agents and compositions encompassed by the present invention is hydrophobic and can be form a kinetically stable complex with gold nanoparticles funcationalized with water-soluble zwitterionic ligands (see, e.g., Kim et al. (2009) JACS 131:1360-1361).

[0907] Agents and compositions encompassed by the present invention can be formulated with gold nanoshells. As a non-limiting example, the compositions can be delivered with a temperature sensitive system comprising polymers and gold nanoshells and can be released photothermally (see, e.g., Sershen el al. (2000) J. Biomed. Mater. 51:293-298). Irradiation at 1064 nm was absorbed by the nanoshells and converted to heat, which led to the collapse of the hydrogen and release of the drug. Agents can also be encapsulated inside hollow gold nanoshells, such as by covalent bonding between agents and nanoparticles. Covalent attachment to gold nanoparticles can be achieved through a linker, such as a free thiol, amine or carboxylate functional group. In some embodiments, the linkers are located on the surface of the gold nanoparticles. In some embodiments, agents encompassed by the present invention can be modified to comprise the linkers. The linkers can comprise a PEG or oligoethylene glycol moiety with varying length to increase the particles' stability in biological environment and to control the density of the drug loads. PEG or oligoethylene glycol moieties also minimize nonspecific adsorption of undesired biomolecules. PEG or oligoethylene gycol moieties can be branched or linear (see, e.g., Tong el al. (2009) Langnuir 25:12454-12549). Agents encompassed by the present invention can be tethered to an amine-functionalized gold nanoparticles (see, e.g., Lippard el al. (2009) JACS 131:14652-14653). The cytotoxic effects for the Pt(IV)-gold nanoparticle complex are higher than the free Pt(IV) drugs and free cisplatin.

[0908] In some embodiments, agents encompassed by the present invention can be formulated with magnetic nanoparticles, such as those made from iron, cobalt, nickel, and oxides thereof, or iron hydroxide nanoparticles. Localized magnetic field gradients can be used to attract magnetic nanoparticles to a chosen site, to hold them until the therapy is complete, and then to remove them (see, e.g., Alexiou et al. (2000) Cancer Res. 60:6641-6648). In some embodiments, agents encompassed by the present invention can be bonded to magnetic nanoparticles with a linker. The linker can be a linker capable of undergoing an intramolecular cyclization to release agents. Any linker and nanoparticles disclosed can be used (see, e.g., PCT Publ. No. WO 2014/124329). Cyclization can be induced by heating the magnetic nanoparticle or by application of an alternating electromagnetic field to the magnetic nanoparticles.

[0909] In some embodiments, agents encompassed by the present invention are loaded onto iron oxide nanoparticles. In some embodiments, the agents encompassed by the present invention are formulated with super paramagnetic nanoparticles based on a core consisting of iron oxides (SPION). SPION are coated with inorganic materials (silica, gold, etc.) or organic materials (phospholipids, fatty acids, polysaccharides, peptides or other surfactants and polymers) and can be further functionalized with drugs, proteins or plasmids.

[0910] In one embodiment, water-dispersible oleic acid (OA)-poloxamer-coated iron oxide magnetic nanoparticles are used (see, e.g., Jain Mol. Pharm. (2005) 2:194-205) can be used to deliver the agents. Agents can partition into the OA shell surrounding the iron oxide nanoparticles and the poloxamer copolymers (e.g., Pluronics) confer aqueous dispersity to the formulation.

[0911] In some embodiments, nanoparticles having a phosphate moiety are used to deliver agents encompassed by the present invention (see, e.g., U.S. Pat. No. 8,828,975). The nanoparticles can comprise gold, iron oxide, titanium dioxide, zinc oxide, tin dioxide, copper, aluminum, cadmium selenide, silicon dioxide, and/or diamond. The nanoparticles can contain a PEG moiety on the surface.

[0912] In some embodiments, agents encompassed by the present invention can be formulated with peptides and/or other conjugates in order to increase penetration of cells such as macrophages and other immune cells. In one embodiment, peptides such as, but not limited to, cell penetrating peptides and proteins and peptides that enable intracellular delivery can be used to deliver pharmaceutical formulations. A non-limiting example of a cell-penetrating peptide that can be used with agents encompassed by the present invention include a cell-penetrating peptide sequence attached to polycations that facilitates delivery to the intracellular space, e.g., HIV-derived TAT peptide, penetratins, transportans, or hCT derived cell-penetrating peptides (see, e.g., Caron et al. (2001)Mol. Ther. 3:310-318; Langel, Cell-Penetrating Peptides: Processes and Applications (CRC Press, Boca Raton Fla., 2002); El-Andaloussi et al. (2003) Curr. Pharm. Des. 11:3597-35611; and Deshayes et al. (2005) Cell. Mol. Life Sci. 62:1839-1849).

[0913] In some embodiments, agents encompassed by the present invention can further comprise one or more conjugates that enhance delivery of the active agents (e.g., siRNA molecules) to targeted cells (e.g., monocytes, macrophages, and the like). The conjugate can be a ligand that can be incorporated into lipid formulations to specifically target cells of interest. Using a ligand targeting strategy for lipid particle drug delivery has the advantages of potentially increasing target specificity and avoiding the need for cationic lipids to trigger intracellular delivery. The ligand can include peptides, antibodies, proteins, polysaccharides, glycolipids, glycoproteins, and lectins which make use of mononuclear phagocytes characteristic receptor expression and phagocytic innate processes.

[0914] In some embodiments, the conjugated ligand can be a cell targeting peptide (CTP) or a cell-penetrating peptide (CPP) which can improve cell-specific targeting and cell uptake. A few example of the peptides include, but are not limited to muramyl tripeptide (MTP), RGD peptide, GGP-peptide that is selectively associated with monocytes (Karathanasis et al. (2009) Ann. Biomed. Figin. 37:1984-1992). The macrophage peptide targeting agent can also include those identified from phage display and sequencing (see, e.g., Liu et al. (2015) Bioconjug. Chem. 26:1811-1817). In some embodiments the ligand can be antibodies and fragments thereof, Exemplary antibodies specific to monocytes and macrophages include anti-VCAM-1 antibodies, anti-CC52 antibodies, anti-CC531 antibodies, anti-CD11c/DEC-205 antibodies. For example, antibodies can be coupled to the surface of liposomes or distally via their Fc-region to liposome-attached PEG.

[0915] In some embodiments, the nanoparticles can be mannosylated by incorporating into the lipid particles a lectin such as alkyl mannosides, Mann-C4-Chol, Mann-His-C4-Chol, Man2DOG, 4-aminophenyl-a-D-mannopyranoside, Aminophenyl-α-D-mannopyranoside, and Man3-DPPE. Immune cells, including alveolar macrophages, peritoneal macrophages, monocyte-derived dendritic cells, and Kupffer cells, constitutively express high levels of the mannose receptor (MR). Macrophages and DCs can therefore be targeted via mannosylated lipid nanoparticles.

[0916] Other ligands can also include maleylated bovine serum albumin (MBSA), O-steroly amylopectin (O-SAP), and fibronectin (see, e.g., Ahsan et al. (2002). J. Cont. Rel. 79:29-40: Vyas et al. (2004) Intl. J. Pharm. 269:37-49).

### VII. Administration and Dosing

[0917] Agents (e.g., compositions and formulations) described herein can contact desired objects (e.g., cells, cell-free binding partners, and the like) and/or be administered to organisms using well-known methods in the art. For example, agents can be delivered into cells via chemical methods, such as cationic liposomes and polymers, or physical methods, such as gene gun, electroporation, particle bombardment, ultrasound utilization, and magnetofection.

[0918] Methods of administration to contact macrophages are well-known in the art, particularly because macrophages are generally present across tissue types (see Ries et al. (2014) Cancer Cell 25:846-859; Perry et al. (2018) J. Exp. Med 215:877-893; Novobrantseva et al. (2012)Mol. Ther. Nucl. Acids 1:e4; Majmudar et al. (2013) Circulation 127:2038-2046; Leuschner et al. (2011) Nat. Biotechnol. 29:11) In addition, administration methods can be tailored to target macrophage populations of interest, such as by using local administration of agents to target spatially restricted populations of macrophages (e.g., intratumoral administration to target TAMs) (see Shirota et al. (2012). J. Immunol. 188:1592-1599; Wang et al. (October 2016) Proc. Natl. Acad. Sci. U.S.A. 113:11525-11530). Such differential administration methods can selectively target macrophage populations of interest while reducing or eliminating contact with other macrophage populations (e.g., intratumoral administration to target TAMs selectively from circulating macrophages).

[0919] Agents can also be administered in an effective amount by any route that results in therapeutically effective outcomes. The administration routes can include, but are not limited to, enteral (into the intestine), gastroenteral, epidural (into the dura matter), oral (by way of the mouth), transdermal, peridural, intracerebral (into the cerebrum), intracerebroventricular (into the cerebral ventricles), epicutaneous (application onto the skin), intradermal, (into the skin itself), subcutaneous (under the skin), nasal administration (through the nose), intravenous (into a vein), intravenous bolus, intravenous drip, intraarterial (into an artery), intramuscular (into a muscle), intracardiac (into the heart), intraosseous infusion (into the bone marrow), intrathecal (into the spinal canal), intraperitoneal, (infusion or injection into the peritoneum), intravesical infusion, intravitreal, (through the eye), intracavernous injection (into a pathologic cavity) intracavitary (into the base of the penis), intravaginal administration, intrauterine, extra-amniotic administration, transdermal (diffusion through the intact skin for systemic distribution), transmucosal (diffusion through a mucous membrane), transvaginal, insufflation (snorting), sublingual, sublabial, enema, eye drops (onto the conjunctiva), in ear drops, auricular (in or by way of the ear), buccal (directed toward the cheek), conjunctival, cutaneous, dental (to a tooth or teeth), electro-osmosis, endocervical, endosinusial, endotracheal, extracorporeal, hemodialysis, infiltration, interstitial, intra-abdominal, intra-amniotic, intra-articular, intrabiliary, intrabronchial, intrabursal, intracartilaginous (within a cartilage), intracaudal (within the cauda equine), intracisternal (within the cisterna magna cerebellomedularis), intracorneal (within the cornea), dental intracornal, intracoronary (within the coronary arteries), intracorporus cavernosum (within the dilatable spaces of the corporus cavernosa of the penis), intradiscal (within a disc), intraductal (within a duct of a gland), intraduodenal (within the duodenum), intradural (within or beneath the dura), intraepidermal (to the epidermis), intraesophageal (to the esophagus), intragastric (within the stomach), intragingival (within the gingivae), intraileal (within the distal portion of the small intestine), intralesional (within or introduced directly to a localized lesion), intraluminal (within a lumen of a tube), intralymphatic (within the lymph), intramedullary (within the marrow cavity of a bone), intrameningeal (within the meninges), intramyocardial (within the myocardium), intraocular (within the eye), intraovarian (within the ovary), intrapericardial (within the pericardium), intrapleural (within the pleura), intraprostatic (within the prostate gland), intrapulmonary (within the lungs or its bronchi), intrasinal (within the nasal or periorbital sinuses), intraspinal (within the vertebral column), intrasynovial (within the synovial cavity of a joint), intratendinous (within a tendon), intratesticular (within the testicle), intrathecal (within the cerebrospinal fluid at any level of the cerebrospinal axis), intrathoracic (within the thorax), intratubular (within the tubules of an organ), intratumor (within a tumor), intratympanic (within the aurus media), intravascular (within a vessel or vessels), intraventricular (within a ventricle), iontophoresis (by means of electric current where ions of soluble salts migrate into the tissues of the body), irrigation (to bathe or flush open wounds or body cavities), laryngeal (directly upon the larynx), nasogastric (through the nose and into the stomach), occlusive dressing technique (topical route administration which is then covered by a dressing which occludes the area), ophthalmic (to the external eye), oropharyngeal (directly to the mouth and pharynx), parenteral, percutaneous, periarticular, peridural, perineural, periodontal, rectal, respiratory (within the respiratory tract by inhaling orally or nasally for local or systemic effect), retrobulbar (behind the pons or behind the eyeball), intramyocardial (entering the myocardium), soft tissue, subarachnoid, subconjunctival, submucosal, topical, transplacental (through or across the placenta), transtracheal (through the wall of the trachea), transtympanic (across or through the tympanic cavity), ureteral (to the ureter), urethral (to the urethra), vaginal, caudal block, diagnostic, nerve block, biliary perfusion, cardiac perfusion, photopheresis or spinal.

[0920] Agents are typically formulated in dosage unit form for ease of administration and uniformity of dosage. It will be understood, however, that the total daily usage of the agents encompassed by the present invention can be decided by the attending physician within the scope of sound medical judgment. The specific therapeutically effective, prophylactically effective, or appropriate imaging dose level for any particular patient will depend upon a variety of factors including the disorder being treated and the severity of the disorder; the activity of the specific agent employed; the specific composition employed; the age, body weight, general health, sex and diet of the patient; the time of administration, route of administration, and rate of excretion of the specific agent employed; the duration of the treatment; drugs used in combination or coincidental with the specific compound employed; and like factors well-known in the medical arts.

[0921] In some embodiments, agents in accordance with the present invention can be administered at dosage levels sufficient to deliver from about 0.0001 mg/kg to about 1000 mg/kg, from about 0.001 mg/kg to about 0.05 mg/kg, from about 0.005 mg/kg to about 0.05 mg/kg, from about 0.001 mg/kg to about 0.005 mg/kg, from about 0.05 mg/kg to about 0.5 mg/kg, from about 0.01 mg/kg to about 50 mg/kg, from about 0.1 mg/kg to about 40 mg/kg, from about 0.5 mg/kg to about 30 mg/kg, from about 0.01 mg/kg to about 10 mg/kg, from about 0.1 mg/kg to about 10 mg/kg, or from about 1 mg/kg to about 25 mg/kg, or from about 10 mg/kg to about 100 mg/kg, or from about 100 mg/kg to about 500 mg/kg, of subject body weight per day, one or more times a day, to obtain the desired therapeutic, diagnostic, prophylactic, or imaging effect. The desired dosage can be delivered three times a day, two times a day, once a day, every other day, every third day, every week, every two weeks, every three weeks, or every four weeks, or every two months. In some embodiments, the desired dosage can be delivered using multiple administrations (e.g., two, three, four, five, six, seven, eight, nine, ten, eleven, twelve, thirteen, fourteen, or more administrations). When multiple administrations are employed, split dosing regimens such as those described herein can be used.

[0922] In some embodiments, an agent encompassed by the present invention is an antibody. As defined herein, a therapeutically effective amount of antibody (i.e., an effective dosage) ranges from about 0.001 to 30 mg/kg body weight, preferably about 0.01 to 25 mg/kg body weight, more preferably about 0.1 to 20 mg/kg body weight, and even more preferably about 1 to 10 mg/kg, 2 to 9 mg/kg, 3 to 8 mg/kg, 4 to 7 mg/kg, or 5 to 6 mg/kg body weight. The skilled artisan will appreciate that certain factors can influence the dosage required to effectively treat a subject, including but not limited to the severity of the disease or disorder, previous treatments, the general health and/or age of the subject, and other diseases present. Moreover, treatment of a subject with a therapeutically effective amount of an antibody can include a single treatment or, preferably, can include a series of treatments. In a preferred example, a subject is treated with antibody in the range of between about 0.1 to 20 mg/kg body weight, one time per week for between about 1 to 10 weeks, preferably between 2 to 8 weeks, more preferably between about 3 to 7 weeks, and even more preferably for about 4, 5, or 6 weeks. It will also be appreciated that the effective dosage of antibody used for treatment can increase or decrease over the course of a particular treatment. Changes in dosage can result from the results of diagnostic assays.

[0923] As used herein, a “split dose” is the division of single unit dose or total daily dose into two or more doses, e.g., two or more administrations of the single unit dose. As used herein, a “single unit dose” is a dose of any therapeutic administered in one dose/at one time/single route/single point of contact, i.e., single administration event. As used herein, a “total daily dose” is an amount given or prescribed in 24 hour period. It can be administered as a single unit dose.

[0924] In some embodiments, the dosage forms can be liquid dosage forms. Liquid dosage forms for parenteral administration include, but are not limited to, pharmaceutically acceptable emulsions, microemulsions, solutions, suspensions, syrups, and/or elixirs. In addition to active ingredients, liquid dosage forms can comprise inert diluents commonly used in the art including, but not limited to, water or other solvents, solubilizing agents and emulsifiers such as ethyl alcohol, isopropyl alcohol, ethyl carbonate, ethyl acetate, benzyl alcohol, benzyl benzoate, propylene glycol, 1,3-butylene glycol, dimethylformamide, oils (in particular, cottonseed, groundnut, corn, germ, olive, castor, and sesame oils), glycerol, tetrahydrofurfuryl alcohol, polyethylene glycols and fatty acid esters of sorbitan, and mixtures thereof. In certain embodiments for parenteral administration, compositions can be mixed with solubilizing agents such as CREMOPHOR®, alcohols, oils, modified oils, glycols, polysorbates, cyclodextrins, polymers, and/or combinations thereof.

[0925] In certain embodiments, the dosages forms can be injectable. Injectable preparations, for example, sterile injectable aqueous or oleaginous suspensions can be formulated according to the known art and can include suitable dispersing agents, wetting agents, and/or suspending agents. Sterile injectable preparations can be sterile injectable solutions, suspensions, and/or emulsions in nontoxic parenterally acceptable diluents and/or solvents, for example, a solution in 1,3-butanediol. Among the acceptable vehicles and solvents that can be employed include, but are not limited to, water, Ringer's solution, U.S.P., and isotonic sodium chloride solution. Sterile, fixed oils are conventionally employed as a solvent or suspending medium. For this purpose any bland fixed oil can be employed including synthetic mono- or diglycerides. Fatty acids, such as oleic acid, can be used in the preparation of injectables. Injectable formulations can be sterilized, for example, by filtration through a bacterial-retaining filter, and/or by incorporating sterilizing agents in the form of sterile solid compositions which can be dissolved or dispersed in sterile water or other sterile injectable medium prior to use.

[0926] In some embodiments, solid dosage forms of tablets, dragees, capsules, pills, and granules can be prepared with coatings and shells such as enteric coatings and other coatings well-known in the pharmaceutical formulating art. They can optionally comprise opacifying agents and can be of a composition that they release the active ingredient(s) only, or preferentially, in a certain part of the intestinal tract, optionally, in a delayed manner. Examples of embedding compositions which can be used include polymeric substances and waxes. Solid compositions of a similar type can be employed as fillers in soft and hard-filled gelatin capsules using such excipients as lactose or milk sugar as well as high molecular weight polyethylene glycols and the like.

[0927] Cells can be administered at 0.1×10⁶, 0.2×10⁶, 0.3×10⁶, 0.4×10⁶,0.5×10⁶, 0.6×10⁶, 0.7×10⁶, 0.8×10⁶, 0.9×10⁶, 1.0×10⁶, 5.0×10⁶, 1.0×10⁷, 5.0×10⁷, 1.0×10⁸, 5.0×10⁸, or more, or any range in between or any value in between, cells per kilogram of subject body weight. The number of cells transplanted can be adjusted based on the desired level of engraftment in a given amount of time. Generally, 1-10⁵ to about 1-10⁹ cells/kg of body weight, from about 1×10⁶ to about 1×10⁸ cells/kg of body weight, or about 1×10⁷ cells/kg of body weight, or more cells, as necessary, can be transplanted. In some embodiment, transplantation of at least about 0.1×10⁶, 0.5×10⁶, 1.0×10⁶, 2.0×10⁶, 3.0×10⁶, 4.0×10⁶, or 5.0×10⁶ total cells relative to an average size mouse is effective.

[0928] Cells can be administered in any suitable route as described herein, such as by infusion. Cells can also be administered before, concurrently with, or after, other anti-cancer agents.

[0929] Administration can be accomplished using methods generally known in the art. Agents, including cells, can be introduced to the desired site by direct injection, or by any other means used in the art including, but are not limited to, intravascular, intracerebral, parenteral, intraperitoneal, intravenous, epidural, intraspinal, intrasternal, intra-articular, intra-synovial, intrathecal, intra-arterial, intracardiac, or intramuscular administration. For example, subjects of interest can be engrafted with the transplanted cells by various routes. Such routes include, but are not limited to, intravenous administration, subcutaneous administration, administration to a specific tissue (e.g., focal transplantation), injection into the femur bone marrow cavity, injection into the spleen, administration under the renal capsule of fetal liver, and the like. In certain embodiment, the cancer vaccine of the present invention is injected to the subject intratumorally or subcutaneously. Cells can be administered in one infusion, or through successive infusions over a defined time period sufficient to generate a desired effect. Exemplary methods for transplantation, engrafiment assessment, and marker phenotyping analysis of transplanted cells are well-known in the art (see, for example, Pearson et al. (2008) Curr. Protoc. Immunol. 81:15.21.1-15.21.21; Ito et al. (2002) Blood 100:3175-3182; Traggiai et al. (2004) Science 304:104-107; Ishikawa et al. Blood (2005) 106:1565-1573; Shultz et al. (2005) J. Immunol. 174:6477-6489; and Holyoake et al. (1999) Exp. Heratol. 27:1418-1427).

[0930] Two or more cell types can be combined and administered, such as cell-based therapy and adoptive cell transfer of stem cells, cancer vaccines and cell-based therapy, and the like. For example, adoptive cell-based immunotherapies can be combined with the cell-based therapies of the present invention. In some embodiments, the cell-based agents can be used alone or in combination with additional cell-based agents, such as immunotherapies like adoptive T cell therapy (ACT). For example, T cells genetically engineered to recognize CD19 used to treat follicular B cell lymphoma. Immune cells for ACT can be dendritic cells, T cells such as CD8⁺ T cells and CD4⁺ T cells, natural killer (NK) cells, NK T cells, cytotoxic T lymphocytes (CTLs), tumor infiltrating lymphocytes (TILs), lymphokine activated killer (LAK) cells, memory T cells, regulatory T cells (Tregs), helper T cells, cytokine-induced killer (CIK) cells, and any combination thereof. Well-known adoptive cell-based immunotherapeutic modalities, including, without limitation, irradiated autologous or allogeneic tumor cells, tumor lysates or apoptotic tumor cells, antigen-presenting cell-based immunotherapy, dendritic cell-based immunotherapy, adoptive T cell transfer, adoptive CAR T cell therapy, autologous immune enhancement therapy (AIET), cancer vaccines, and/or antigen presenting cells. Such cell-based immunotherapies can be further modified to express one or more gene products to further modulate immune responses, such as expressing cytokines like GM-CSF, and/or to express tumor-associated antigen (TAA) antigens, such as Mage-1, gp-100, and the like. The ratio of an agent encompassed by the present invention, such as cancer cells, to another agent encompassed by the present invention or other composition can be 1:1 relative to each other (e.g., equal amounts of 2 agents, 3 agents, 4 agents, etc.), but can modulated in any amount desired (e.g., 1:1, 1.1:1, 1.2:1, 1.3:1, 1.4:1, 1.5:1, 2:1, 2.5:1, 3:1, 3.5:1, 4:1, 4.5:1, 5:1, 5.5:1, 6:1, 6.5:1, 7:1, 7.5:1, 8:1, 8.5:1, 9:1, 9.5:1, 10:1, or greater).

[0931] Engraftment of transplanted cells can be assessed by any of various methods, such as, but not limited to, tumor volume, cytokine levels, time of administration, flow cytometric analysis of cells of interest obtained from the subject at one or more time points following transplantation, and the like. For example, a time-based analysis of waiting 1, 2, 3, 4, 5, 6, 7, 8, 9, 10, 11, 12, 13, 14, 15, 16, 17, 18, 19, 20, 21, 22, 23, 24, 25, 26, 27, 28 days or can signal the time for tumor harvesting. Any such metrics are variables that can be adjusted according to well-known parameters in order to determine the effect of the variable on a response to anti-cancer immunotherapy. In addition, the transplanted cells can be co-transplanted with other agents, such as cytokines, extracellular matrices, cell culture supports, and the like.

### VII. Kits

[0932] The present invention also encompasses kits for detecting and/or modulating biomarkers described herein. A “kit” is any manufacture (e.g. a package or container) comprising at least one reagent, e.g. a probe or small molecule, for specifically detecting and/or affecting the expression of a marker of the present invention. The kit can be promoted, distributed, or sold as a unit for performing the methods of the present invention. The kit can comprise one or more reagents necessary to detect, express, screen, and the like one or more agents useful in the methods of the present invention. For example, combinations of agents useful for detecting biomarkers encompassed by the present invention (e.g., targets listed in Table 1 and/or Table 2) can be provided in a kit to detect the biomarkers and modulation thereof, which is useful for identifying monocyte and/or macrophage inflammatory phenotype, immune response, anti-cancer function, sensitivity to immune checkpoint therapy, and the like. Such combinations can include one or more agents to detect 1, 2, 3, 4, 5, 6, 7, 8, 9, 10, or more biomarkers inclusive, such as up to and including all of the biomarkers encompassed by the present invention.

[0933] In some embodiments, the kit can further comprise a reference standard, e.g., a nucleic acid encoding a protein that does not affect or regulate signaling pathways controlling cell growth, division, migration, survival or apoptosis. One skilled in the art can envision many such control proteins, including, but not limited to, common molecular tags (e.g., green fluorescent protein and beta-galactosidase), proteins not classified in any of pathway encompassing cell growth, division, migration, survival or apoptosis by GeneOntology reference, or ubiquitous housekeeping proteins. Reagents in the kit can be provided in individual containers or as mixtures of two or more reagents in a single container. In addition, instructional materials which describe the use of the compositions within the kit can be included. A kit encompassed by the present invention can also include instructional materials disclosing or describing the use of the kit or an antibody of the disclosed invention in a method of the disclosed invention as provided herein. A kit can also include additional components to facilitate the particular application for which the kit is designed. For example, a kit can additionally contain means of detecting the label (e.g., enzyme substrates for enzymatic labels, filter sets to detect fluorescent labels, appropriate secondary labels such as a sheep anti-mouse-HRP, etc.) and reagents necessary for controls (e.g., control biological samples or standards). A kit can additionally include buffers and other reagents recognized for use in a method of the disclosed invention. Non-limiting examples include agents to reduce non-specific binding, such as a carrier protein or a detergent.

[0934] Other embodiments encompassed by the present invention are described in the following Examples. The present invention is further illustrated by the following examples which should not be construed as further limiting.

### EXAMPLES

### Example 1: A Primary Monocyte and Macrophage System Recapitulates Biological Properties of In Vivo Monocytes and Macrophages

[0935] Human macrophages exist along a differentiation spectrum from pro-inflammatory (M1-like, also referred to herein as Type 1) to pro-tumorigenic/anti-inflammatory (M2-like, also referred to herein as Type 2) (see, e.g., Biswas et al. (2010) Nat. Immunol. 11: 889-896; Mosser and Edwards (2008) Nat. Rev. Immunol. 8:958-969; Mantovani et al. (2009) Hum. Immunol. 70:325-330). Along this spectrum of functionality, macrophages alter their surface marker expression and morphology, in additional to altering multiple other characteristics. Understanding how these markers change along this spectrum in primary human macrophages is important for understanding what cells are present in a given immunological environment, such as within tumors (tumor-associated macrophages) and/or inflamed tissues, and for understanding how these macrophages affect the immune response within these tissues. Certain cell surface markers, including CD163, CD16, and CD206, traditionally have been used to classify macrophage subtypes. In addition to these surface markers, macrophage subtypes display unique morphologies. M1 macrophages display a dendritic cell-like appearance with increased dendrite projections. M2 macrophages display either a more rounded or spindle-like morphology.

[0936] For each monocyte/macrophage cell-based experiment described herein, primary human monocytes/macrophages were used, as opposed to using cell lines, in order to recapitulate the biological properties mimicking in vivo existing cells in the closest possible way that any in vitro experimental system with isolated cell types allows. In particular, the system provides access to studying natural biological properties of primary cells and provides access to natural diversity arising from different donors having different genetic and environmental exposures. Therefore, it is important to consider natural genetic and immunological variability among the human population when interpreting the results of the assays.

[0937] Monocytes were differentiated in vitro to M1-like (Type 1) and/or M2-like (Type 2) phenotypes (Ries et a. (2014) Cancer Cell 25:846-859; Vogel et al. (2014) Immunobiol. 219:695-703). In order to differentiate monocytes into M1 versus M2 phenotypes monocytes were isolated from whole blood of healthy donors by Ficoll separation with RosetteSep™ Human Monocyte Enrichment Cocktail (Stemcell Technologies, Vancouver, Canada) according to the manufacturer's instructions. Isolated monocytes were arrayed in 24-well plates overnight in IMDM Media containing 10% fetal bovine serum and non-adherent cells were washed off after 24 hours. Monocytes were differentiated into macrophages by culturing for 6 days in IMDM 10% FBS plus 50 ng/ml human M-CSF for M2 macrophages, or 50 ng/ml GM-CSF (Biolegend, San Diego, Calif.) for M1 macrophages. After 6 days, M1 macrophages were activated with 10 ng/ml human interferon gamma and 100 ng/ml LPS (Invivogen, San Diego, Calif.) and M2-like macrophages were divided into two separate cultures where each was further induced into M2c macrophages by adding IL- and M2d macrophages by adding IL-4, IL-10 and TGF-β, respectively. At day 8, macrophages were harvested and processed for further analysis. Expression of M1 and M2 macrophage markers and surface expressed targets was assessed by flow cytometry. For flow cytometry, cells were collected and resuspended in 50 ul FACS buffer (PBS+2.5% FBS+0.5% sodium azide) and blocked for 15 minutes with TruStain FcX™ (Biolegend Cat. No. 422302) on ice. Antibodies (Table 3) were diluted in FACS buffer according to the manufacturer's instructions and added to cells for 15 minutes on ice.

[0938] Labeled cells were washed twice with FACS buffer and fixed with PBS+2% paraformaldehyde for flow cytometry analysis on an Attune™ flow cytometer (ThermoFisher). Data were analyzed via FlowJo software. Morphology was assessed via microscopy.

TABLE 3
Flow Antibodies

| Antigen | Clone | Source |
|---|---|---|
| CD163 | 215927 | RnD Systems |
| CD16 | 3a8 | BioLegend |
| CD206 | 15-2 | BioLegend |
| SIGLEC9 | 191240 | RnD Systems |
| LCP2 | 130407-085 | Miltenyi Biatec |
| CLEC7A | 15E2 | BioLegend |
| SIGLEC7 | 194211 | RnD Systems |
| CD33 | WM53 | Biolegend |
| SELPLG | 688101 | RnD Systems |
| CCR5 | J418F1 | BioLegend |
| CD84 | CD84.1.21 | BioLegend |
| C3AR1 | hC3ARZ8 | BioLegend |
| CD37 | MB371 | BD Biosciences |
| VISG4 | JAV4 | eBioscience |
| LILRB2 | 287219 | RnD Systems |
| TIM3 | 344823 | RnD Systems |
| TLR8 | 935166 | RnD Systems |
| CD48 | 394607 | RnD Systems |
| CD53 | H129 | BioLegend |
| SRPa | SE5A5 | BioLegend |
| CD74 | LN2 | BioLegend |
| RP105 | MHR73-11 | BioLegend |
| CD45 | 2D1 | BioLegend |
| CD3 | OKT3 | BioLegend |
| CD4 | A161A1 | BioLegend |
| CD19 | HIB19 | BioLegend |
| PD-1 | NAT105 | BioLegend |
| CD11b | ICRF44 | BioLegend |
| CD8a | RPA-T8 | BioLegend |
| CD14 | M5E2 | BioLegend |
| CD56 | 5.1H11 | BioLegend |
| IFNg | 4S.B3 | BioLegend |
| Granzyme B | GB11 | BioLegend |

[0939] The skewing of macrophages towards an M2 phenotype was shown to upregulate CD163, CD16, and CD206 relative to M1 macrophages (FIG. 1A). In addition to these classic markers, FIG. 1B shows that the new biomarkers described herein, such as CD53, PSGL1, and VSIG4, are also upregulated on M2 macrophages. FIG. 1C demonstrates the morphological differences that exist within the macrophage spectrum and, importantly, demonstrates the variability that exists within primary human cells.

### Example 2: Validation of Targets that Modulate Macrophage Inflammatory Phenotype by Target Nucleic Acid Knockdown

[0940] In order to validate the ability of macrophage associated targets described herein to modulate macrophage phenotype, target knockdown experiments were performed, such as by using target-specific siRNAs that were designed, validated, and tested in primary human macrophages.

[0941] siRNAs were synthesized by AXO Labs (Kulmbach, Germany). Oligoribonucleotides were synthesized using phosphoramidite technology on solid phase employing an ABI 394 synthesizer (Applied Biosystems) at 10 μmol scale. Syntheses were performed on a solid support made of controlled pore glass (CPG, 520\acute{Å}, with a loading of 75 μmol/g, obtained from Prime Synthesis, Aston, Pa., USA). Regular RNA phosphoramidites, 2′-O-methylphosphoramidites, and ancillary reagents were purchased from Proligo (Hamburg, Germany). Specifically, the following amidites were used: (5′-O-dimethoxytrityl-N6-(benzoyl)-2′-O-t-butyldimethylsilyl-adenosine-3′-O-(2-cyanoethyl-N,N-diisopropylamino) phosphoramidite, 5′-O-dimethoxytrityl-N4-(acetyl)-2′-O-t-butyldimethylsilyl-cytidine-3′-O-(2-cyanoethyl-N,N-diisopropylamino) phosphoramidite, (5′-O-dimethoxytrityl-N2-(isobutyryl)-2′-O-t-butyldimethylsilyl-guanosine-3′-O-(2-cyanoethyl-N,N-diisopropylamino) phosphoramidite, and 5′-O-dimethoxytrityl-2′-O-t-butyldimethylsilyl-uridine-3′-O-(2-cyanoethyl-N,N-diisopropylamino) phosphoramidite. 2′-O-Methylphosphoramidites carried the same protecting groups as the regular RNA amidites. All amidites were dissolved in anhydrous acetonitrile (100 mM) and molecular sieves (3\acute{Å}) were added. 5-ethyl thiotetrazole (ETT, 500 mM in acetonitrile) was used as activator solution. Coupling times were 6 minutes. In order to introduce phosphorothioate linkages, a 50 mM solution of 3-((N,N-dimethylaminomethylidene)amino)-3H-1,2,4-dithiazole-5-thione (DDTT, obtained from Chemgenes, Wilmington, Mass., USA) in anhydrous acetonitrile was employed.

[0942] After finalization of the solid phase synthesis, the dried solid support was transferred to a 15 mL tube and treated with methylamine in methanol (2M, Aldrich) for 180 min at 45° C. After centrifugation, the supernatant was transferred to a new 15 mL tube and the CPG was washed with 1200 μL N-methylpyrolidin-2-one (NMP, Fluka, Buchs, Switzerland). The washing was combined with the methanolic methylamine solution and 450 μL triethylamine trihydrofluoride (TEA·3HF, Alfa Aesar, Karlsruhe, Germany) was added. This mixture was brought to 65° C. for 150 min. After cooling to room temperature, 0.75 mL NMP and 1.5 mL of ethoxytrimethylsilane (Merck, Darmstadt, Germany) was added. Ten minutes later, the precipitated oligoribonucleotide was collected by centrifugation, the supernatant was discarded, and the solid was reconstituted in 1 mL Buffer A (described below).

[0943] Crude oligomers were purified by anionic exchange HPLC using a column packed with Source Q15 (GE Healthcare) and an AKTA Explorer system (GE Healthcare). Buffer A was 10 mM sodium perchlorate, 20 mM Tris, 1 mM EDTA, pH 7.4 (Sigma Aldrich) and contained 20% acetonitrile. Buffer B was the same as Buffer A with the exception of 500 mM sodium perchlorate. A gradient of 22% B to 42% B within 42 column volumes (CV) was employed. UV traces at 280 nm were recorded. Appropriate fractions were pooled and precipitated with 3M NaOAc, pH of 5.2, and 70% ethanol. Finally, the pellet was washed with 70% ethanol. Alternatively, desalting was carried out using Sephadex® HiTrap® columns (GE Healthcare) according to the manufacturer's recommendations. The concentration of the solution was determined by absorbance measurement at 260 nm in a UV photometer (Eppendorf, Hamburg, Germany). Until annealing, the individual strands were stored as frozen solutions at −20° C.

[0944] Complementary strands were annealed by combining equimolar RNA solutions. The mixture was lyophilized and reconstituted with an appropriate volume of annealing buffer (100 mM NaCl, 20 mM sodium phosphate, pH 6.8) to achieve the desired concentration. This solution was placed into a water bath at 75° C. and was cooled to room temperature within 2 hours.

[0945] Dose response curves for siRNAs were generated in vitro using a variety of cell lines according to Table 4.

TABLE 4
Cell lines and conditions for siRNA analyses

| | | Cell Seeding | Endpoint Assay to Measure mRNA |
|---|---|---|---|
| Gene | Cell Line | Density per Well | Knockdown |
| SIGLEC9 | Hepa1-6 + reporter plasmid | 15,000 | Dual-Glo Luciferase Assay |
| CD74 | THP-1 | 25,000 | bDNA Assay |
| SELPLG | THP-1 | 25,000 | bDNA Assay |
| VSIG4 | Hepa1-6 + reporter plasmid | 15,000 | Dual-Glo Luciferase Assay |
| LRRC25 | Hepa1-6 + reporter plasmid | 15,000 | Dual-Glo Luciferase Assay |
| CD84 | Hepa1-6 + reporter plasmid | 15,000 | Dual-Glo Luciferase Assay |
| IGSF6 | Hepa1-6 + reporter plasmid | 15,000 | Dual-Glo Luciferase Assay |
| CD48 | Hepa1-6 + reporter plasmid | 15,000 | Dual-Glo Luciferase Assay |
| CD33 | SK-MEL-2 | 15,000 | bDNA Assay |
| CD207 | Hepal-6 + reporter plasmid | 15,000 | Dual-Glo Luciferase Assay |
| LILRB2 | Hepa1-6 + reporter plasmid | 20,000 | Dual-Glo Luciferase Assay |
| EVI2B | A172 | 15,000 | bDNA Assay |
| CLEC7A | Hepa1-6 + reporter plasmid | 20,000 | Dual-Glo Luciferase Assay |
| SIGLEC7 | Hepa1-6 + reporter plasmid | 20,000 | Dual-Glo Luciferase Assay |
| AIF1 | THP-1 | 25,000 | bDNA Assay |
| LST1 | THP-1 | 25,000 | bDNA Assay |
| TNFAIP8L2 | THP-1 | 25,000 | bDNA Assay |
| SPI1 | THP-1 | 25,000 | bDNA Assay |
| TBXAS1 | A549 | 15,000 | bDNA Assay |
| CD37 | THP-1 | 25,000 | bDNA Assay |
| CD53 | THP-1 | 25,000 | bDNA Assay |
| FERMT3 | THP-1 | 25,000 | bDNA Assay |
| CXorf21 | THP-1 | 25,000 | bDNA Assay |
| CCR5 | Hepal-6 + reporter plasmid | 20,000 | Dual-Glo Luciferase Assay |
| DOCK2 | THP-1 | 25,000 | bDNA Assay |

[0946] Briefly, cells were seeded in 96-well plates and reverse transfected with siRNA, Lipofectamine® 2000 (0.5 uL/well; ThermoFisher), and, in some cases, a reporter plasmid (50 ng/well). The reporter plasmid (psiCHECK™-2, Promega) encoded both firefly luciferase and the gene of interest fused to renilla luciferase; silencing of the gene of interest results in proportional silencing of renilla luciferase but leaves firefly luciferase unaffected as an internal control.

[0947] After 24 hr incubation at 37° C., mRNA knockdown was measured using an endpoint assay. For targets without a reporter plasmid, a branched DNA (bDNA) assay was performed according to the manufacturer's instructions (QuantiGene® Singleplex Gene Expression Assay, ThermoFisher) to measure both the target gene and GAPDH (housekeeping gene) mRNA. Data are plotted as siRNA concentration (nM) vs. remaining mRNA (ratio of target gene to GAPDH, normalized to mock siRNA-transfected cells). For targets with a reporter plasmid, a Dual-Glo® Luciferase Assay was performed according to the manufacturer's instructions (Promega) to measure firefly and renilla luciferase expression. Data are plotted as siRNA concentration (nM) vs. remaining mRNA (ratio of renilla to firefly luminescence, normalized to mock siRNA-transfected cells).

[0948] For all dose response curves, a 4-parameter logistic model was applied to determine the IC50 of each siRNA sequence (Table 5 and FIG. 2). Data shown in Table 5 and FIG. 2 represent the mean of quadruplicates, +/−standard deviation.

TABLE 5
siRNA sequences and IC50 values

| Target | siRNA ID | IC50 (nM) | Sense | Antisense |
|---|---|---|---|---|
| SIGLEC9 | XD-09180 | 0.040 | 5′-acAAGuAAAcuGcuGacGAdTsdT-3′ | 5′-UCGUcAGcAGUUuACUUGUdTsdT-3′ |
| SIGLEC9 | XD-09181 | 0.286 | 5′-guAAAcuGcuGAcgAuGcAdTsdT-3′ | 5′-UGcAUCGUcAGcAGUUuACdTsdT-3′ |
| SIGLEC9 | XD-09182 | 0.837 | 5′-ucGcAuGGcuGGAuuuAccdTsdT-3′ | 5′-GGuAAAUCcAGCcAUGCGAdTsdT-3′ |
| SIGLEC9 | XD-09183 | 0.229 | 5′-guuccGGGAAGGGgccAAudTsdT-3′ | 5′-AUUGGCCCCUUCCCGGAACdTsdT-3′ |
| SIGLEC9 | XD-09184 | 0.127 | 5′-ggGccAAuAcAGAccAGGAdTsdT-3′ | 5′-UCCUGGUCUGuAUUGGCCCdTsdT-3′ |
| SIGLEC9 | XD-09185 | 0.094 | 5′-ccAGAAGAAGuGAuGcGGGdTsdT-3′ | 5′-CCCGcAUcACUUCUUCUGGdTsdT-3′ |
| SIGLEC9 | XD-09186 | 0.488 | 5′-ucAccGGcucucuguGAAudTsdT-3′ | 5′-AUUcAcAGAGAGCCGGUGAdTsdT-3′ |
| SIGLEC9 | XD-09187 | 0.406 | 5′-gaccAcGaacAAGaccGucdTsdT-3′ | 5′-GACGGUCUUGUUCGUGGUCdTsdT-3′ |
| SIGLEC9 | XD-09188 | 0.148 | 5′-gaAcAAGAccGuccAucucdTsdT-3′ | 5′-GAGAUGGACGGUCUUGUUCdTsdT-3′ |
| SIGLEC9 | XD-09189 | 0.694 | 5′-agAccGuccAucucAAcGudTsdT-3′ | 5′-ACGUUGAGAUGGACGGUCUdTsdT-3′ |
| SIGLEC9 | XD-09190 | 0.905 | 5′-ccGuccAucucAAcGuGucdTsdT-3′ | 5′-GAcACGUUGAGAUGGACGGdTsdT-3′ |
| SIGLEC9 | XD-09191 | n.d. | 5′-ggAGAcGGcAcAGuAuccAdTsdT-3′ | 5′-UGGAuACUGUGCCGUCUCCdTsdT-3′ |
| SIGLEC9 | XD-09192 | 0.236 | 5′-caGuAuccAcAGucuuGGGdTsdT-3′ | 5′-CCcAAGACUGUGGAuACUGdTsdT-3′ |
| SIGLEC9 | XD-09193 | 0.459 | 5′-guAuccAcAGucuuGGGAAdTsdT-3′ | 5′-UUCCcAAGACUGUGGAuACdTsdT-3′ |
| SIGLEC9 | XD-09194 | 5.626 | 5′-cucAGcAGGucuAccuGAAdTsdT-3′ | 5′-UUcAGGuAGACCUGCUGAGdTsdT-3′ |
| SIGLEC9 | XD-09195 | 0.125 | 5′-gcGuGGGAGAuAcgGGcAudTsdT-3′ | 5′-AUGCCCGuAUCUCCcACGCdTsdT-3′ |
| SIGLEC9 | XD-09196 | n.d. | 5′-ugGGAGAuAcGGGcAuAGAdTsdT-3′ | 5′-UCuAUGCCCGuAUCUCCcAdTsdT-3′ |
| SIGLEC9 | XD-09197 | 0.851 | 5′-ggAGAuAcGGGcAuAGAGGdTsdT-3′ | 5′-CCUCuAUGCCCGuAUCUCCdTsdT-3′ |
| SIGLEC9 | XD-09198 | n.d. | 5′-gauAcGGGcAuAGaGGAuGdTsdT-3′ | 5′-cAUCCUCuAUGCCCGuAUCdTsdT-3′ |
| SIGLEC9 | XD-09199 | n.d. | 5′-acGGGcAuAGAGGauGcAAdTsdT-3′ | 5′-UUGCAUCCUCuAUGCCCGudTsdT-3′ |
| CD74 | XD-09223 | 0.340 | 5′-ggAGcuGucGGGAaGAucAdTsdT-3′ | 5′-UGAUCUUCCCGAcAGCUCCdTsdT-3′ |
| CD74 | XD-09224 | 1.983 | 5′-gcGcGAccuuAucuccAAcdTsdT-3′ | 5′-GUUGGAGAuAAGGUCGCGCdTsdT-3′ |
| CD74 | XD-09225 | n.d. | 5′-gcGAccuuAucuccAAcAAdTsdT-3′ | 5′-UUGUUGGAGAuAAGGUCGCdTsdT-3′ |
| CD74 | XD-09226 | 0.143 | 5′-cuGGAcAAAcuGAcAGucAdTsdT-3′ | 5′-AGACUGUcAGUUUGUCcAGdTsdT-3′ |
| CD74 | XD-09227 | 0.583 | 5′-ggAAcuGGAGGAcccGucudTsdT-3′ | 5′-AGACGGGUCCUCcAGUUCCdTsdT-3′ |
| CD74 | XD-09228 | n.d. | 5′-gcAGAGGcGGucuucAAcAdTsdT-3′ | 5′-UGUUGAAGACCGCCUCUGCdTsdT-3′ |
| CD74 | XD-09229 | n.d. | 5′-uguAccucAucccauGAGAdTsdT-3′ | 5′-UCUcAUGGGAUGAGGuAcAdTsdT-3′ |
| CD74 | XD-09230 | 0.196 | 5′-gacAAAccAAGucgGaacAdTsdT-3′ | 5′-UGUUCCGACUUGGUUUGUCdTsdT-3′ |
| CD74 | XD-09231 | 0.255 | 5′-aaAccAAGucGGAacAGcAdTsdT-3′ | 5′-UGCUGUUCCGACUUGGUUUdTsdT-3′ |
| CD74 | XD-09232 | 0.747 | 5′-agcuAGAcAGAuccccGuudTsdT-3′ | 5′-AACGGGGAUCUGUCuAGCUdTsdT-3′ |
| CD74 | XD-09233 | n.d. | 5′-cuAGGcucAuGGAcGAGAudTsdT-3′ | 5′-AUCUCGUCcAUGAGCCuAGdTsdT-3′ |
| CD74 | XD-09234 | n.d. | 5′-gaGAAGGGAuAAcccuAcAdTsdT-3′ | 5′-UGuAGGGUuAUCCCUUCUCdTsdT-3′ |
| CD74 | XD-09235 | 0.245 | 5′-ccAAuGuuuuccAcccAuAdTsdT-3′ | 5′-uAUGGGUGGAAAAcAUUGGdTsdT-3′ |
| CD74 | XD-09236 | n.d. | 5′-guuuuccAcccAuaAuccudTsdT-3′ | 5′-AGGAUuAUGGGUGGAAAACdTsdT-3′ |
| CD74 | XD-09237 | 1.841 | 5′-ccAuAAuccuuucuGccGAdTsdT-3′ | 5′-UCGGcAGAAAGGAUuAUGGdTsdT-3′ |
| CD74 | XD-09238 | n.d. | 5′-ccAAGcuuGuuAucAGcuudTsdT-3′ | 5′-AAGCUGAuAAcAAGCUUGGdTsdT-3′ |
| CD74 | XD-09239 | 0.070 | 5′-ggccAuGGuucAcauuAGAdTsdT-3′ | 5′-UCuAAUGUGAACcAUGGCCdTsdT-3′ |
| CD53 | XD-09200 | n.d. | 5′-ccGGAuAucuGuGuuAccAdTsdT-3′ | 5′-UGGuAAcAcAGAuAUCCGGdTsdT-3′ |
| CD53 | XD-09201 | 0.067 | 5′-gcAuGAGuAGcuugAAAcudTsdT-3′ | 5′-AGUUUcAAGCuACUcAUGCdTsdT-3′ |
| CD53 | XD-09203 | 0.178 | 5′-gcAuGGGcucuAucAAGGAdTsdT-3′ | 5′-UCCUUGAuAGAGCCcAUGCdTsdT-3′ |
| CD53 | XD-09205 | 0.132 | 5′-acuAAuAucuGAGcAucuudTsdT-3′ | 5′-AAGAUGCUcAGAuAUuAGUdTsdT-3′ |
| CD53 | XD-09206 | n.d. | 5′-ggAuuuAAuGGcccAAcAudTsdT-3′ | 5′-AUGUUGGGCcAUuAAAUCCdTsdT-3′ |
| CD53 | XD-09207 | 0.038 | 5′-agGGcAAGAucucauuucAdTsdT-3′ | 5′-UGAAAUGAGAUCUUGCCCUdTsdT-3′ |
| CD53 | XD-09208 | 0.162 | 5′-uuuAuuAGAGGGccuuAuudTsdT-3′ | 5′-AAuAAGGCCCUCuAAuAAAdTsdT-3′ |
| CD53 | XD-09209 | 0.041 | 5′-auuGAuGuGuucuaAGucudTsdT-3′ | 5′-AGACUuAGAAcAcAUcAAUdTsdT-3′ |
| SELPLG | XD-09260 | n.d. | 5′-ggGcAGAuGAAGccGAGAAdTsdT-3′ | 5′-UUCUCGGCUUcAUCUGCCCdTsdT-3′ |
| SELPLG | XD-09261 | 0.386 | 5′-ccAccGAAuAUGAguAccudTsdT-3′ | 5′-AGGuACUcAuAUUCGGUGGdTsdT-3′ |
| SELPLG | XD-09262 | 1.354 | 5′-ccGAAuAuGAGuAccuAGAdTsdT-3′ | 5′-UCuAGGuACUcAuAUUCGGdTsdT-3′ |
| SELPLG | XD-09263 | 2.964 | 5′-gcAcAGAccAcucaAcccAdTsdT-3′ | 5′-UGGGUUGAGUGGUCUGUGCdTsdT-3′ |
| SELPLG | XD-09264 | 1.963 | 5′-accAAAAGAGGucuGuucAdTsdT-3′ | 5′-UGAAcAGACCUCUUUUGGUdTsdT-3′ |
| SELPLG | XD-09265 | 0.486 | 5′-aaGcAGAcGGGcAaGuGGAdTsdT-3′ | 5′-UCcACUUGCCCGUCUGCUUdTsdT-3′ |
| SELPLG | XD-09266 | 0.207 | 5′-aguAcuGAAGAGugAcGGAdTsdT-3′ | 5′-UCCGUcACUCUUcAGuACUdTsdT-3′ |
| SELPLG | XD-09267 | 1.067 | 5′-acuGAAGAGuGAcgGAcuudTsdT-3′ | 5′-AAGUCCGUcACUCUUcAGUdTsdT-3′ |
| SELPLG | XD-09268 | 0.471 | 5′-ccAAGGGcAGAccuuucuudTsdT-3′ | 5′-AAGAAAGGUCUGCCCUUGGdTsdT-3′ |
| VSIG4 | XD-09170 | 0.024 | 5′-aaGGcuAcAcccAaGucuudTsdT-3′ | 5′-AAGACUUGGGUGuAGCCUUdTsdT-3′ |
| VSIG4 | XD-09171 | 0.023 | 5′-cuuucuAcGuGAcucuucudTsdT-3′ | 5′-AGAAGAGUcACGuAGAAAGdTsdT-3′ |
| VSIG4 | XD-09172 | <0.005 | 5′-gcAAccAAGucGugAGAGAdTsdT-3′ | 5′-UCUCUcACGACUUGGUUGCdTsdT-3′ |
| VSIG4 | XD-09173 | <0.005 | 5′-cguGAGAGAuAAGauuAcudTsdT-3′ | 5′-AGuAAUCUuAUCUCUcACGdTsdT-3′ |
| VSIG4 | XD-09174 | 0.036 | 5′-aacAAGAGcAuGucuAcGAdTsdT-3′ | 5′-UCGuAGAcAUGCUCUUGUUdTsdT-3′ |
| VSIG4 | XD-09176 | 0.031 | 5′-cacuAGGAcuuGGucAucAdTsdT-3′ | 5′-AGAUGACcAAGUCCuAGUGdTsdT-3′ |
| VSIG4 | XD-09177 | 0.007 | 5′-acuAGGAcuuGGucAucAudTsdT-3′ | 5′-AUGAUGACcAAGUCCuAGUdTsdT-3′ |
| VSIG4 | XD-09178 | 0.060 | 5′-gucAucAuGccuAcAGAcAdTsdT-3′ | 5′-UGUCUGuAGGcAUGAUGACdTsdT-3′ |
| VSIG4 | XD-09179 | 0.006 | 5′-ggccAGAcAGcuuuuAAuudTsdT-3′ | 5′-AAUuAAAAGCUGUCUGGCCdTsdT-3′ |
| LRRC25 | XD-09250 | 14.978 | 5′-gccAGAGGAAcGccAGcGAdTsdT-3′ | 5′-UCGCUGGCGUUCCUCUGGCdTsdT-3′ |
| LRRC25 | XD-09251 | 2.770 | 5′-gccGucGcuuuuccAGcAudTsdT-3′ | 5′-AUGCUGGAAAAGCGACGGCdTsdT-3′ |
| LRRC25 | XD-09252 | n.d. | 5′-ggAAcGGccuGcGaGAGcudTsdT-3′ | 5′-AGCUCUCGcAGGCCGUUCCdTsdT-3′ |
| LRRC25 | XD-09256 | 0.601 | 5′-ccGAcuAuGAGAAcAuGuudTsdT-3′ | 5′-AAcAUGUUCUcAuAGUCGGdTsdT-3′ |
| LRRC25 | XD-09257 | n.d. | 5′-gccuAAGAuGuccuAAccudTsdT-3′ | 5′-AGGUuAGGAcAUCUuAGGCdTsdT-3′ |
| LRRC25 | XD-09258 | 0.033 | 5′-caAuAAAuGcuucgAGGcudTsdT-3′ | 5′-AGCCUCGAAGcAUUuAUUGdTsdT-3′ |
| LRRC25 | XD-09259 | 0.293 | 5′-cuucGAGGcuGAugAGGcudTsdT-3′ | 5′-AGCCUcAUcAGCCUCGAAGdTsdT-3′ |
| AIF1 | XD-09660 | n.d. | 5′-cuuAAuGGAAAuGgcGAuAdTsdT-3′ | 5′-uAUCGCcAUUUCcAUuAAGdTsdT-3′ |
| AIF1 | XD-09661 | 0.045 | 5′-uaAuGGAAAuGGcgAuAuudTsdT-3′ | 5′-AAuAUCGCcAUUUCcAUuAdTsdT-3′ |
| AIF1 | XD-09662 | 0.120 | 5′-uaucAuGucccuGaAAcGAdTsdT-3′ | 5′-UCGUUUcAGGGAcAUGAuAdTsdT-3′ |
| AIF1 | XD-09663 | 0.263 | 5′-gaAAcGAAuGcuGgAGAAAdTsdT-3′ | 5′-UUUCUCcAGcAUUCGUUUCdTsdT-3′ |
| AIF1 | XD-09664 | 0.433 | 5′-agAcucAccuAGAgcuAAAdTsdT-3′ | 5′-UUuAGCUCuAGGUGAGUCUdTsdT-3′ |
| AIF1 | XD-09665 | 0.349 | 5′-cucAccuAGAGcuaAAGAAdTsdT-3′ | 5′-UUCUUuAGCUCuAGGUGAGdTsdT-3′ |
| AIF1 | XD-09666 | 0.105 | 5′-ucAccuAGAGcuAaAGAAAdTsdT-3′ | 5′-UUUCUUuAGCUCuAGGUGAdTsdT-3′ |
| AIF1 | XD-09667 | 0.042 | 5′-accuAGAGcuAAAgAAAuudTsdT-3′ | 5′-AAUUUCUUuAGCUCuAGGUdTsdT-3′ |
| AIF1 | XD-09668 | 0.267 | 5′-ccuAGAGcuAAAGaAAuuAdTsdT-3′ | 5′-uAAUUUCUUuAGCUCuAGGdTsdT-3′ |
| AIF1 | XD-09669 | 1.234 | 5′-ccGGGGAGAcGuucAGcuAdTsdT-3′ | 5′-uAGCUGAACGUCUCCCCGGdTsdT-3′ |
| CD84 | XD-09610 | 0.047 | 5′-accAAAAAuuAcAcAGAGudTsdT-3′ | 5′-ACUCUGUGuAAUUUUUGGUdTsdT-3′ |
| CD84 | XD-09611 | 0.082 | 5′-gaGGGuAAuGuccuucAAAdTsdT-3′ | 5′-UUUGAAGGAcAUuACCCUCdTsdT-3′ |
| CD84 | XD-09612 | 0.351 | 5′-gguAAuGuccuucaAAucudTsdT-3′ | 5′-AGAUUUGAAGGAcAUuACCdTsdT-3′ |
| CD84 | XD-09613 | 0.241 | 5′-ucAuAuGAucAuuuAAGGAdTsdT-3′ | 5′-UCCUuAAAUGAUcAuAUGAdTsdT-3′ |
| CD84 | XD-09614 | <0.005 | 5′-gaAcAcAGuuuAuuccGAAdTsdT-3′ | 5′-UUCGGAAuAAACUGUGUUCdTsdT-3′ |
| CD84 | XD-09615 | 0.048 | 5′-ggAAcuGGGuAuAauccAAdTsdT-3′ | 5′-UUGGAUuAuACCcAGUUCCdTsdT-3′ |
| CD84 | XD-09616 | 0.067 | 5′-gcAccAAcuAccAuuAGcAdTsdT-3′ | 5′-AGCuAAUGGuAGUUGGUGCdTsdT-3′ |
| CD84 | XD-09617 | 0.010 | 5′-cacuAcAGuuAAcgcuGAAdTsdT-3′ | 5′-UUcAGCGUuAACUGuAGUGdTsdT-3′ |
| CD84 | XD-09618 | <0.005 | 5′-gguAucAGGAAucaAAAuudTsdT-3′ | 5′-AAUUUUGAUUCCUGAuACCdTsdT-3′ |
| CD84 | XD-09619 | <0.005 | 5′-ccuuAcAGcAuAAcuAAuudTsdT-3′ | 5′-AAUuAGUuAUGCUGuAAGGdTsdT-3′ |
| IGSF6 | XD-09641 | n.d. | 5′-gaGGccGucAccAuAAAGudTsdT-3′ | 5′-ACUUuAUGGUGACGGCCUCdTsdT-3′ |
| IGSF6 | XD-09642 | 0.035 | 5′-gaAGcGAGAGcuAaAcAGAdTsdT-3′ | 5′-UCUGUUuAGCUCUCGCUUCdTsdT-3′ |
| IGSF6 | XD-09643 | 0.077 | 5′-guGcucGGcGuAuuuuucAdTsdT-3′ | 5′-UGAAAAAuACGCCGAGcACdTsdT-3′ |
| IGSF6 | XD-09645 | 0.034 | 5′-agAAcuAuAccAuaAGAGAdTsdT-3′ | 5′-UCUCUuAUGGuAuAGUUCUdTsdT-3′ |
| IGSF6 | XD-09646 | 0.010 | 5′-ccAuAAGAGAcAuguGGAAdTsdT-3′ | 5′-UUCcAcAUGUCUCUuAUGGdTsdT-3′ |
| IGSF6 | XD-09647 | 0.069 | 5′-ggccAuAGAAAcGuuuuAAdTsdT-3′ | 5′-UuAAAACGUUUCuAUGGCCdTsdT-3′ |
| IGSF6 | XD-09648 | 0.503 | 5′-ccAuAGAAAcGuuuuAAuudTsdT-3′ | 5′-AAUuAAAACGUUUCuAUGGdTsdT-3′ |
| IGSF6 | XD-09649 | 0.503 | 5′-acAuAuAucAucAgGucuudTsdT-3′ | 5′-AAGACCUGAUGAuAuAUGUdTsdT-3′ |
| FERMT3 | XD-09700 | n.d. | 5′-cgAcGcAcGccucuucuuudTsdT-3′ | 5′-AAAGAAGAGGCGUGCGUCGdTsdT-3′ |
| FERMT3 | XD-09701 | 0.921 | 5′-ggcuGcGcuucAAguAcuAdTsdT-3′ | 5′-uAGuACUUGAAGCGcAGCCdTsdT-3′ |
| FERMT3 | XD-09705 | 6.753 | 5′-guucccGAuGuuAacGucudTsdT-3′ | 5′-AGACGUuAAcAUCGGGAACdTsdT-3′ |
| FERMT3 | XD-09707 | n.d. | 5′-ccAGcuGccGAAuuGuAcAdTsdT-3′ | 5′-UGuAcAAUUCGGcAGCUGGdTsdT-3′ |
| FERMT3 | XD-09708 | 0.012 | 5′-gcuGccGAAuuGuacAcGAdTsdT-3′ | 5′-UCGUGuAcAAUUCGGcAGCdTsdT-3′ |
| FERMT3 | XD-09709 | 0.048 | 5′-guAGcuAcAGGAugAuGAAdTsdT-3′ | 5′-UUcAUcAUCCUGuAGCuACdTsdT-3′ |
| CD48 | XD-09720 | 0.012 | 5′-cucuGGAAuuGcuacuGcudTsdT-3′ | 5′-AGcAGuAGcAAUUCcAGAGdTsdT-3′ |
| CD48 | XD-09721 | 0.009 | 5′-cuAAccuGGuuuuauAcuudTsdT-3′ | 5′-AAGuAuAAAACcAGGUuAGdTsdT-3′ |
| CD48 | XD-09722 | 0.014 | 5′-cuuucGAccAGAAgAuuGudTsdT-3′ | 5′-AcAAUCUUCUGGUCGAAAGdTsdT-3′ |
| CD48 | XD-09723 | 0.030 | 5′-uccAGAAAAucuAaGuAcudTsdT-3′ | 5′-AGuACUuAGAUUUUCUGGAdTsdT-3′ |
| CD48 | XD-09724 | 0.055 | 5′-gaAuccAAAuuuAaAGGcAdTsdT-3′ | 5′-UGCCUUuAAAUUUGGAUUCdTsdT-3′ |
| CD48 | XD-09725 | 0.022 | 5′-cccAAGccuGucAucAAAAdTsdT-3′ | 5′-UUUUGAUGAcAGGCUUGGGdTsdT-3′ |
| CD48 | XD-09726 | 0.017 | 5′-acAAcuGuuAucugAAAcudTsdT-3′ | 5′-AGUUUcAGAuAAcAGUUGUdTsdT-3′ |
| CD48 | XD-09727 | 0.046 | 5′-ccuGGcGAGucuGuAAAcudTsdT-3′ | 5′-AGUUuAcAGACUCGCcAGGdTsdT-3′ |
| CD48 | XD-09728 | 0.032 | 5′-cuGGcGAGucuGuaAAcuAdTsdT-3′ | 5′-UagUUuAcAGACUCGCcAGdTsdT-3′ |
| CD48 | XD-09729 | 0.015 | 5′-uguuAuAcuuGccaAGucAdTsdT-3′ | 5′-UGACUUGGcAAGuAuAAcAdTsdT-3′ |
| CD33 | XD-09731 | n.d. | 5′-ccGGccAcuccAAaAAccudTsdT-3′ | 5′-AGGUUUUUGGAGUGGCCGGdTsdT-3′ |
| CD33 | XD-09732 | 5.400 | 5′-ggccccAGGAcuAcucAcudTsdT-3′ | 5′-AGUGAGuAGUCCUGGGGCCdTsdT-3′ |
| CD33 | XD-09734 | 0.740 | 5′-acuccucGGuGcucAuAAudTsdT-3′ | 5′-AUuAUGAGcACCGAGGAGUdTsdT-3′ |
| CD33 | XD-09735 | 0.818 | 5′-caAcGucAccuAuguuccAdTsdT-3′ | 5′-UGGAAcAuAGGUGACGUUGdTsdT-3′ |
| CD33 | XD-09736 | 0.176 | 5′-ucAccuAuGuuccacAGAAdTsdT-3′ | 5′-UUCUGUGGAAcAuAGGUGAdTsdT-3′ |
| CD33 | XD-09737 | 0.334 | 5′-cccAAcAAcuGGuaucuuudTsdT-3′ | 5′-AAAGAuACcAGUUGUUGGGdTsdT-3′ |
| CD33 | XD-09738 | 0.220 | 5′-ccAGAGcAGGAGugGuucAdTsdT-3′ | 5′-UGAACcACUCCUGCUCUGGdTsdT-3′ |
| CD33 | XD-09739 | n.d. | 5′-gguucAuGGGGccauuGGAdTsdT-3′ | 5′-UCcAAUGGCCCcAUGAACCdTsdT-3′ |
| LST1 | XD-09750 | 3.594 | 5′-cuGAucAuuucGccuAAAAdTsdT-3′ | 5′-UUUuAGGCGAAAUGAUcAGdTsdT-3′ |
| LST1 | XD-09751 | 1.539 | 5′-cauuucGccuAAAaGAGcAdTsdT-3′ | 5′-UGCUCUUUuAGGCGAAAUGdTsdT-3′ |
| LST1 | XD-09752 | 0.737 | 5′-gccuAAAAGAGcAaGGAcudTsdT-3′ | 5′-AGUCCUUGCUCUUUuAGGCdTsdT-3′ |
| LST1 | XD-09753 | n.d. | 5′-ggAAcuccAcuAugcAucudTsdT-3′ | 5′-AGAUGcAuAGUGGAGUUCCdTsdT-3′ |
| LST1 | XD-09754 | 0.052 | 5′-caAGGAGGAuccAaGAGcudTsdT-3′ | 5′-AGCUCUUGGAUCCUCCUUGdTsdT-3′ |
| LST1 | XD-09755 | 0.046 | 5′-ggAuccAAGAGcugAcuAudTsdT-3′ | 5′-AuAGUcAGCUCUUGGAUCCdTsdT-3′ |
| LST1 | XD-09756 | 6.598 | 5′-ucucGAGccuccGuucAAAdTsdT-3′ | 5′-UUUGAACGGAGGCUCGAGAdTsdT-3′ |
| LST1 | XD-09757 | n.d. | 5′-cuccGuucAAAuugAucAudTsdT-3′ | 5′-AUGAUcAAUUUGAACGGAGdTsdT-3′ |
| LST1 | XD-09758 | 8.205 | 5′-ugAucAucAucAAaAcuuAdTsdT-3′ | 5′-uAAGUUUUGAUGAUGAUcAdTsdT-3′ |
| LST1 | XD-09759 | n.d. | 5′-accuuuGAAuAGGgAAuuudTsdT-3′ | 5′-AAAUUCCCuAUUcAAAGGUdTsdT-3′ |
| TNFAIP8L2 | XD-09760 | 0.058 | 5′-ggAccAGGccGuGaucucudTsdT-3′ | 5′-AGAGAUcACGGCCUGGUCCdTsdT-3′ |
| TNFAIP8L2 | XD-09761 | 0.701 | 5′-ggucAGGuGGAGAucucuudTsdT-3′ | 5′-AAGAGAUCUCcACCUGACCdTsdT-3′ |
| TNFAIP8L2 | XD-09762 | 0.226 | 5′-uuuAAuGuAucGcuAccAAdTsdT-3′ | 5′-UUGGuAGCGAuAcAUuAAAdTsdT-3′ |
| TNFAIP8L2 | XD-09763 | n.d. | 5′-aaAucGAcAccuGaAAAAGdTsdT-3′ | 5′-CUUUUUcAGGUGUCGAUUUdTsdT-3′ |
| TNFAIP8L2 | XD-09764 | 2.979 | 5′-cguuGcGcuGGAAgGAAuudTsdT-3′ | 5′-AAUUCCUUCcAGCGcAACGdTsdT-3′ |
| TNFAIP8L2 | XD-09765 | 0.023 | 5′-cuGcGcGAGGcGcaAuAcAdTsdT-3′ | 5′-UGuAUUGCGCCUCGCGcAGdTsdT-3′ |
| TNFAIP8L2 | XD-09766 | 0.127 | 5′-cccucGAuGuAcAuAGcuudTsdT-3′ | 5′-AAGCuAUGuAcAUCGAGGGdTsdT-3′ |
| TNFAIP8L2 | XD-09767 | n.d. | 5′-cacAGuGcAuAAGcAGuuudTsdT-3′ | 5′-AAACUGCUuAUGcACUGUGdTsdT-3′ |
| TNFAIP8L2 | XD-09768 | 0.353 | 5′-aaAucAAucAuGuuAcAcudTsdT-3′ | 5′-AGUGuAAcAUGAUUGAUUUdTsdT-3′ |
| TNFAIP8L2 | XD-09796 | 11.602 | 5′-gcAcAuAGcAAGcuGAAcudTsdT-3′ | 5′-AGUUcAGCUUGCuAUGUGCdTsdT-3′ |
| CD37 | XD-09770 | 0.553 | 5′-gcuuGcGGGAcGucGuAGAdTsdT-3′ | 5′-UCuACGACGUCCCGcAAGCdTsdT-3′ |
| CD37 | XD-09771 | 0.388 | 5′-gacGucGuAGAGAaAAccAdTsdT-3′ | 5′-UGGUUUUCUCuACGACGUCdTsdT-3′ |
| CD37 | XD-09773 | 0.311 | 5′-cgAccAAcGAcuccAcAAudTsdT-3′ | 5′-AUUGUGGAGUCGUUGGUCGdTsdT-3′ |
| CD37 | XD-09774 | 0.129 | 5′-ccAAcGAcuccAcaAuccudTsdT-3′ | 5′-AGGAUUGUGGAGUCGUUGGdTsdT-3′ |
| CD37 | XD-09775 | 1.600 | 5′-ccAcAAuccuAGAuAAGGudTsdT-3′ | 5′-ACCUuAUCuAGGAUUGUGGdTsdT-3′ |
| CD37 | XD-09776 | 1.320 | 5′-ggcuGcAcAAcAAccuuAudTsdT-3′ | 5′-AuAAGGUUGUUGUGcAGCCdTsdT-3′ |
| CD37 | XD-09777 | 0.414 | 5′-guucAuGAcGcucucGAuAdTsdT-3′ | 5′-uAUCGAGAGCGUcAUGAACdTsdT-3′ |
| CD37 | XD-09778 | 11.400 | 5′-cgGcucGcucGAuaccGuudTsdT-3′ | 5′-AACGGuAUCGAGCGAGCCGdTsdT-3′ |
| CD37 | XD-09779 | <0.005 | 5′-accAcccAcAAGAuuAuuudTsdT-3′ | 5′-AAAuAAUCUUGUGGGUGGUdTsdT-3′ |
| SPI1 | XD-09780 | 2.663 | 5′-ggAucuAuAccAAcGccAAdTsdT-3′ | 5′-UUGGCGUUGGuAuAGAUCCdTsdT-3′ |
| SPI1 | XD-09781 | 0.455 | 5′-cgccAAAcGcAcGaGuAuudTsdT-3′ | 5′-AAuACUCGUGCGUUUGGCGdTsdT-3′ |
| SPI1 | XD-09782 | n.d. | 5′-gcuucGccGAGAAcAAcuudTsdT-3′ | 5′-AAGUUGUUCUCGGCGAAGCdTsdT-3′ |
| SPI1 | XD-09783 | 1.108 | 5′-gcGAcAuGAAGGAcAGcAudTsdT-3′ | 5′-AUGCUGUCCUUcAUGUCGCdTsdT-3′ |
| SPI1 | XD-09784 | n.d. | 5′-cccGcuGGccAuAgcAuuAdTsdT-3′ | 5′-uAAUGCuAUGGCcAGCGGGdTsdT-3′ |
| SPI1 | XD-09785 | 0.479 | 5′-gucucAAGuccGuauGuaadTsdT-3′ | 5′-UuAcAuACGGACUUGAGACdTsdT-3′ |
| SPI1 | XD-09786 | 0.250 | 5′-ucucAAGuccGuAuGuAAAdTsdT-3′ | 5′-UUuAcAuACGGACUUGAGAdTsdT-3′ |
| SPI1 | XD-09787 | 0.075 | 5′-ccGuAuGuAAAucaGAucudTsdT-3′ | 5′-AGAUCUGAUUuAcAuACGGdTsdT-3′ |
| SPI1 | XD-09788 | 1.316 | 5′-acAAGuAAAGuuAuucucAdTsdT-3′ | 5′-UGAGAAuAACUUuACUUGUdTsdT-3′ |
| SPI1 | XD-09789 | 0.442 | 5′-aaAGuuAuucucAauccAudTsdT-3′ | 5′-AUGGAUUGAGAAuAACUUUdTsdT-3′ |
| CD207 | XD-09240 | 0.678 | 5′-guGAGcAcucAGGauGAcudTsdT-3′ | 5′-AGUcAUCCUGAGUGCUcACdTsdT-3′ |
| CD207 | XD-09241 | 0.203 | 5′-gaAAAcAcccAcAguccGudTsdT-3′ | 5′-ACGGACUGUGGGUGUUUUCdTsdT-3′ |
| CD207 | XD-09242 | 0.009 | 5′-caGuccGuGcuGcauuAAudTsdT-3′ | 5′-AUuAAUGcAGcACGGACUGdTsdT-3′ |
| CD207 | XD-09243 | 0.198 | 5′-guccGuGcuGcAuuAAucudTsdT-3′ | 5′-AGAUuAAUGcAGcACGGACdTsdT-3′ |
| CD207 | XD-09244 | 0.005 | 5′-ugcuGAAAGGucGuGuGGAdTsdT-3′ | 5′-UCcAcACGACCUUUcAGcAdTsdT-3′ |
| CD207 | XD-09245 | 0.020 | 5′-gcGuucAGAuccAgAuGGudTsdT-3′ | 5′-ACcAUCUGGAUCUGAACGCdTsdT-3′ |
| CD207 | XD-09246 | 0.025 | 5′-aaAuAcAAAGAuccGGGcAdTsdT-3′ | 5′-UGCCCGGAUCUUUGuAUUUdTsdT-3′ |
| CD207 | XD-09247 | n.d. | 5′-auAuGAGcAAGuugcucAAdTsdT-3′ | 5′-UUGAGcAACUUGCUcAuAUdTsdT-3′ |
| CD207 | XD-09248 | <0.005 | 5′-uauucuAcAGGuGguuucudTsdT-3′ | 5′-AGAAACcACCUGuAGAAuAdTsdT-3′ |
| CD207 | XD-09249 | 0.153 | 5′-uauAGuGccGAGcaGuucudTsdT-3′ | 5′-AGAACUGCUCGGcACuAuAdTsdT-3′ |
| LILRB2 | XD-10590 | 0.068 | 5′-caGcAuCuuGGAuuAcAcsa-3′ | 5′-dTGUGuAAUCcAAGAUGCUGusu-3′ |
| LILRB2 | XD-10591 | 0.073 | 5′-ggAuAcGAccAGAgcuugsa-3′ | 5′-dTCAAGCUCUGGUCGuAUccusu-3′ |
| LILRB2 | XD-10592 | 0.459 | 5′-gcGAuAUGGcuGucAGuasa-3′ | 5′-dTUACUGAcAGCcAUAUCGCusu-3′ |
| LILRB2 | XD-10593 | 0.136 | 5′-cuAuGGUuAuGAcuuGAasa-3′ | 5′-dTUUcAAGUcAuAACcAuAGusu-3′ |
| LILRB2 | XD-10594 | 0.089 | 5′-gguuAuGAcuuGAccucusa-3′ | 5′-dTAGAGUUcAAGUcAuAACCusu-3′ |
| LILRB2 | XD-10595 | n.d. | 5′-ggcAcACccuucAucucasa-3′ | 5′-dTUGAGAUGAAGGGUGUGCCusu-3′ |
| LILRB2 | XD-10597 | 0.059 | 5′-cccAcuCcGucuAaGAucsa-3′ | 5′-dTGAUCUuAGACGGAGUGGGusu-3′ |
| LILRB2 | XD-10598 | 0.109 | 5′-ccAcucCGucuAAgAucasa-3′ | 5′-dTUGAUCUuAGACGGAGUGGusu-3′ |
| LILRB2 | XD-10599 | 0.127 | 5′-cacuccGucuAAGaucAasa-3′ | 5′-dTUUGAUCUuAGACGGAGUGusu-3′ |
| EVI2B | XD-10480 | 0.094 | 5′-gaGAcAAuuAcAAcAGAGAdTsdT-3′ | 5′-UCUCUGUUGuAAUUGUCUDdTsdT-3′ |
| EVI2B | XD-10481 | 0.169 | 5′-cuuuGGGucAAccaAcAcAdTsdT-3′ | 5′-UGUGUUGGUUGACCcAAAGdTsdT-3′ |
| EVI2B | XD-10482 | 0.017 | 5′-caAccAAcAccAAuAGccAdTsdT-3′ | 5′-UGGCuAUUGGUGUUGGUUGdTsdT-3′ |
| EVI2B | XD-10483 | 3.272 | 5′-ccAucuGcccGuAcuucuAdTsdT-3′ | 5′-uAGAAGuACGGGcAGAUGGdTsdT-3′ |
| EVI2B | XD-10484 | 0.014 | 5′-ccAccAAAGucAuuuGucudTsdT-3′ | 5′-AGAcAAAUGACUUUGGUGGdTsdT-3′ |
| EVI2B | XD-10485 | 1.380 | 5′-gucAAAAAuucAccuAGGAdTsdT-3′ | 5′-UCCuAGGUGAAUUUUUGACdTsdT-3′ |
| EVI2B | XD-10486 | 0.225 | 5′-ggAuuuAucuuAGauAcuAdTsdT-3′ | 5′-uAGuAUCuAAGAuAAAUCCdTsdT-3′ |
| EVI2B | XD-10487 | 0.156 | 5′-cauAcuAAuuGGuguAcuudTsdT-3′ | 5′-AAGuAcACcAAUuAGuAUGdTsdT-3′ |
| EVI2B | XD-10488 | 2.552 | 5′-agcuAuAAucAucauuGuAdTsdT-3′ | 5′-uAcAAUGAUGAUuAuAGCUdTsdT-3′ |
| EVI2B | XD-10489 | 0.013 | 5′-cucccAAcucuGAucAAGAdTsdT-3′ | 5′-UCUUGAUcAGAGUUGGGAGdTsdT-3′ |
| CLEC7A | XD-10560 | 0.005 | 5′-ggAuAuAcucAAuuAcAcudTsdT-3′ | 5′-AGUGuAAUUGAGuAuAUCCdTsdT-3′ |
| CLEC7A | XD-10561 | 0.009 | 5′-ggucAAGAuAAAugcAGAAdTsdT-3′ | 5′-UUCUGcAUUaAUCUUAACCdTsdT-3′ |
| CLEC7A | XD-10562 | 0.033 | 5′-agGuAGGcuAGuAuuAuuudTsdT-3′ | 5′-AAAuAAuACuAGCCuACCUdTsdT-3′ |
| CLEC7A | XD-10563 | 0.005 | 5′-ccccAAGcuuGAAuuuucAdTsdT-3′ | 5′-AGAAAAUUcAAGCUUGGGGdTsdT-3′ |
| CLEC7A | XD-10564 | <0.004 | 5′-ggGuAAGccAuAAgcGaaudTsdT-3′ | 5′-AUUCGCUuAUGGCUuACCCdTsdT-3′ |
| CLEC7A | XD-10565 | <0.004 | 5′-ccAuAAGcGAAucuuAAuudTsdT-3′ | 5′-AAUuAAGAUUCGCUuAUGGdTsdT-3′ |
| CLEC7A | XD-10566 | 0.006 | 5′-ugccAuAucucuAauAGAAdTsdT-3′ | 5′-UUCuAUuAGAGAuAUGGcAdTsdT-3′ |
| CLEC7A | XD-10567 | 0.023 | 5′-gccuAGAAucuuGuAuAAudTsdT-3′ | 5′-AUuAuAcAAGAUUCuAGGCdTsdT-3′ |
| CLEC7A | XD-10568 | 0.016 | 5′-ccuAGAAucuuGuauAAuAdTsdT-3′ | 5′-uAUuAuAcAAGAUUCuAGGdTsdT-3′ |
| CLEC7A | XD-10569 | 0.016 | 5′-gcucucAuAGGAAaGuuuudTsdT-3′ | 5′-AAAACUUUCCuAUGAGAGCdTsdT-3′ |
| CXorf21 | XD-10502 | 6.027 | 5′-cuGucAGAAGGGuaucucAdTsdT-3′ | 5′-UGAGAuACCCUUCUGAcAGdTsdT-3′ |
| CXorf21 | XD-10503 | 0.654 | 5′-cuAcGuGAGcuGcaAAucAdTsdT-3′ | 5′-UGAUUUGcAGCUcACGuAGdTsdT-3′ |
| CXorf21 | XD-10504 | 1.756 | 5′-gguGAuGGccAuuaAuucAdTsdT-3′ | 5′-UGAAUuAAUGGCcAUcACCdTsdT-3′ |
| CXorf21 | XD-10505 | 13.103 | 5′-cauuAuGGAcAccguGuuudTsdT-3′ | 5′-AAAcACGGUGUCcAuAAUGdTsdT-3′ |
| CXorf21 | XD-10506 | 0.750 | 5′-gucuGAAcucAucauGAcAdTsdT-3′ | 5′-UGUcAUGAUGAGUUcAGACdTsdT-3′ |
| CXorf21 | XD-10507 | n.d. | 5′-gcAAuuGAuGucAacuGAAdTsdT-3′ | 5′-UUcAGUUGAcAUcAAUUGCdTsdT-3′ |
| CXorf21 | XD-10508 | 1.653 | 5′-caAuGuAAAuccAuAGAGAdTsdT-3′ | 5′-UCUCuAUGGAUUuAcAUUGdTsdT-3′ |
| CXorf21 | XD-10509 | n.d. | 5′-guAAGAGGAGccAuAAGGAdTsdT-3′ | 5′-UCCUuAUGGCUCCUCUuACdTsdT-3′ |
| TBXAS1 | XD-10490 | 0.573 | 5′-gccGAcAGcGuucuGuuuudTsdT-3′ | 5′-AAAAcAGAACGCUGUCGGCdTsdT-3′ |
| TBXAS1 | XD-10491 | 0.048 | 5′-cuGcAAGcGuuucuucGAAdTsdT-3′ | 5′-UUCGAAGAAACGCUUGcAGdTsdT-3′ |
| TBXAS1 | XD-10492 | 1.437 | 5′-gcccGGAuuuuGcccAAuAdTsdT-3′ | 5′-uAUUGGGcAAAAUCCGGGCdTsdT-3′ |
| TBXAS1 | XD-10493 | 0.239 | 5′-ggAuuuuGcccAAuAAGAAdTsdT-3′ | 5′-UUCUuAUUGGGcAAAAUCCdTsdT-3′ |
| TBXAS1 | XD-10494 | 0.049 | 5′-caAuAAGAAccGAgAcGAAdTsdT-3′ | 5′-UUCGUCUCGGUUCUuAUUGdTsdT-3′ |
| TBXAS1 | XD-10495 | 0.125 | 5′-gaAccGAGAcGAAcuGAAudTsdT-3′ | 5′-AUUcAGUUCGUCUCGGUUCdTsdT-3′ |
| TBXAS1 | XD-10496 | 0.061 | 5′-agAcGAAcuGAAugGcuuudTsdT-3′ | 5′-AAAGCcAUUcAGUUCGUCUdTsdT-3′ |
| TBXAS1 | XD-10497 | 0.137 | 5′-ccAuGGGcGuGcAaGAcuudTsdT-3′ | 5′-AAGUCUUGcACGCCcAUGGdTsdT-3′ |
| TBXAS1 | XD-10498 | 0.273 | 5′-gcGuGcAAGAcuuuGAcAudTsdT-3′ | 5′-AUGUcAAAGUCUUGcACGCdTsdT-3′ |
| SIGLEC7 | XD-10600 | 0.155 | 5′-agAGuAAccGGAAgCAuusa-3′ | 5′-dTAAUCCUUCCGGUUACUCUusu-3′ |
| SIGLEC7 | XD-10601 | 0.127 | 5′-gaGuAACcGGAAGgAuuasa-3′ | 5′-dTUAAUCCUUCCGGUuACUCusu-3′ |
| SIGLEC7 | XD-10602 | 3.534 | 5′-guAAccGGAAGGAuuAcusa-3′ | 5′-dTAGuAAUCCUUCCGGUuACusu-3′ |
| SIGLEC7 | XD-10603 | 0.029 | 5′-cgGAAGGAuuAcucGcugsa-3′ | 5′-dTCAGCGAGuAAUCCUUCCGusu-3′ |
| SIGLEC7 | XD-10604 | 0.032 | 5′-ggAAGGAuuAcucgcuGasa-3′ | 5′-dTUcAGCGAGuAAUCCUUCCusu-3′ |
| SIGLEC7 | XD-10605 | 0.022 | 5′-ggAuuACucGcuGacGAusa-3′ | 5′-dTAUCGUcAGCGAGUAAUCCusu-3′ |
| SIGLEC7 | XD-10606 | 0.045 | 5′-ccGuGcAAGAGGGcAuGusa-3′ | 5′-dTAcAUGCCCUCUUGcACGGusu-3′ |
| SIGLEC7 | XD-10607 | 0.039 | 5′-cgGGcAGGGAAuGauAuasa-3′ | 5′-dTUAuAUcAUUCCCUGCCCGusu-3′ |
| SIGLEC7 | XD-10608 | 0.056 | 5′-gcAGGGAAuGAuAuAAGcsa-3′ | 5′-dTGCUuAuAUcAUUCCCUGCusu-3′ |
| SIGLEC7 | XD-10609 | 0.059 | 5′-ggAAuGAuAuAAGcuGGasa-3′ | 5′-dTUCcAGCUuAuAUCAUUCCusu-3′ |
| CCR5 | XD-10550 | 0.017 | 5′-ggAAcAAGAuGGAuuAucAdTsdT-3′ | 5′-UGAuAAUCcAUCUUGUUCCdTsdT-3′ |
| CCR5 | XD-10551 | 0.046 | 5′-ccAuAcAGucAGuaucAAudTsdT-3′ | 5′-AUUGAuACUGACUGuAUGGdTsdT-3′ |
| CCR5 | XD-10552 | 0.070 | 5′-cauuAAAGAuAGucAucuudTsdT-3′ | 5′-AAGAUGACuAUCUUuAAUGdTsdT-3′ |
| CCR5 | XD-10553 | 0.361 | 5′-agGuAuGGuuAAuaAGuuudTsdT-3′ | 5′-AAACUuAUuAACcAuACCUdTsdT-3′ |
| CCR5 | XD-10554 | n.d. | 5′-gauccuGGuuGGuguuGcAdTsdT-3′ | 5′-UGcAAcACcAACcAGGAUCdTsdT-3′ |
| CCR5 | XD-10555 | n.d. | 5′-guAuGAGGucuAGgAAcAUdTsdT-3′ | 5′-AUGUUCCuAGACCUcAuACdTsdT-3′ |
| CCR5 | XD-10556 | n.d. | 5′-caucAAAcucuuAguuAcudTsdT-3′ | 5′-AGuAACuAAGAGUUUGAUGdTsdT-3′ |
| CCR5 | XD-10557 | n.d. | 5′-cuccGuAuuucAGacuGAAdTsdT-3′ | 5′-UUcAGUCUGAAAuACGGAGdTsdT-3′ |
| CCR5 | XD-10558 | 1.052 | 5′-gcAcAuAcuuGAGacuGuudTsdT-3′ | 5′-AAcAGUCUcAAGuAUGUGCdTsdT-3′ |
| CCR5 | XD-10559 | 1.018 | 5′-gcAAcGAAGGGAAauGucudTsdT-3′ | 5′-AGAcAUUUCCCUUCGUUGCdTsdT-3′ |
| DOCK2 | XD-09690 | n.d. | 5′-cacGGcGuGGccAuAuAcAdTsdT-3′ | 5′-UGuAuAUGGCcACGCCGUGdTsdT-3′ |
| DOCK2 | XD-09691 | 11.713 | 5′-ggGGAuAccucAuaAAGcAdTsdT-3′ | 5′-UGCUUuAUGAGGuAUCCCCdTsdT-3′ |
| DOCK2 | XD-09692 | n.d. | 5′-caAGcAAAcGGucauAAGudTsdT-3′ | 5′-ACUuAUGACCGUUUGCUUGdTsdT-3′ |
| DOCK2 | XD-09693 | n.d. | 5′-uuGuGuAcuAucAaGucAAdTsdT-3′ | 5′-UUGACUUGAuAGuAcAcAAdTsdT-3′ |
| DOCK2 | XD-09694 | 0.403 | 5′-ccAucuGcGAuucauGuuudTsdT-3′ | 5′-AAAcAUGAAUCGcAGAUGGdTsdT-3′ |
| DOCK2 | XD-09695 | n.d. | 5′-cucuAcAcGAuGGauuccAdTsdT-3′ | 5′-UGGAAUCcAUCGUGuAGAGdTsdT-3′ |
| DOCK2 | XD-09696 | 1.775 | 5′-cucAuuGcAGAccgGAAAudTsdT-3′ | 5′-AUUUCCGGUCUGcAAUGAGdTsdT-3′ |
| DOCK2 | XD-09697 | 0.556 | 5′-accGGAAAuuucAgcAuuudTsdT-3′ | 5′-AAAUGCUGAAAUUUCCGGUdTsdT-3′ |
| DOCK2 | XD-09698 | 1.356 | 5′-ggucGAGGAcAuuauuuucdTsdT-3′ | 5′-GAAAAuAAUGUCCUCGACCdTsdT-3′ |
| FLuc | XD-00194 | n.d. | 5′-cuuAcGcuGAGuAcuucGAdTsdT-3′ | 5′-UCGAAGuACUcAGCGuAAGdTsdT-3′ |
| (control) | | | | |

[0949] The validated siRNAs were then used in primary human macrophage assays to determine the ability of target knockdown to alter the pro-tumorigenic (M2) or pro-inflammatory (M1) phenotype as described above in Example 1. Briefly, monocytes were isolated from whole blood of fresh donors by Ficoll separation with RosetteSep™ Human Monocyte Enrichment Cocktail (Stemcell Techhnologies, Vancouver Canada) according to the manufacturer's instructions. Isolated monocytes were arrayed in 24-well plates overnight in Iscove's Modified Dubelcos Media (IMDM) (ThermoFisher) media containing 10% fetal bovine serum and non-adherent cells were washed off after 24 hours. Monocytes were differentiated into macrophages by culturing for 6 days in MDM 10% FBS plus 50 ng/ml human M-CSF for M2 macrophages, or 50 ng/ml GM-CSF (Biolegend, San Diego, Calif.) for M1 macrophages.

[0950] siRNA lipid nanoparticles were administered at a final concentration of 50 nM on Day 1 and Day 3. C12-200 lipid nanoparticles (LNPs) were formulated as described in Novobrantseva el al. (2012) Mol Ther. Nucl. Acids 1:e4. Briefly, an ethanolic phase containing the ionizable lipid C12-200 (described in Love et al. (2010) AXO Labs GmbH, Kulmbach, Germany; available on the World Wide Web at doi.org/10.1073/pnas.0910603106), distearoyl-sn-glycero-3-phosphocholine (DSPC, Avanti Polar Lipids, Alabaster Ala.), cholesterol (MP Biomedicals, Santa Ana Calif.), and DMPE-PEG2000 (1,2-dimyristoyl-sn-glycero-3-phosphoethanolamine-N-[methoxy(polyethylene glycol)-2000], Avanti) at a molar ratio of 50:10:38.5:1.5 were mixed together with an aqueous phase of siRNA in 10 mM citrate buffer via microfluidic mixing. The ethanol:aqueous volume ratio was 1:3, and the total lipid:siRNA weight ratio was approximately 9:1. The resulting LNPs were dialyzed against 1×PBS overnight. Formulated LNPs had median particle diameters of approximately 60-70 nm as measured by nanoparticle tracking analysis (ZetaView, ParticleMetrix) and siRNA encapsulation efficiencies of approximately 80-90% as measured by a modified Quant-iT™ RiboGreen® assay (Heyes et al., 2005; doi:10.1016/j.jconrel.2005.06.014).

[0951] On day 6 of culture M2 macrophages were polarized with 20 ng/ml human IL-10 (Biolegend, San Diego, Calif.). Forty-eight hours later, macrophages were removed from plates by scraping and mRNA levels were assessed by bDNA as described above. FIG. 3A shows the relative knockdown of each individual target assessed in M2 macrophages. FIG. 3B shows the knockdown of the target protein if they are surface expressed, in the same M2 macrophages, via flow cytometric anlaysis.

[0952] FIG. 3 shows the results from the siRNA-treated M2 macropahges described above demonstrating 26 validated targets that were determined to drive M2 macrophages toward an M1 phenotype and/or further along the M2 spectrum, such as by assessment using the expression of traditional markers of CD163, CD16, and CD206, as well as via biomarkers described in Example 1 above, such as CD53, PSGL1, and VSIG4. Additionally, these targets demonstrated an ability to alter the morphology of these M2 macrophages to be M1-like and/or more M2-like. Importantly, cells within these assays undergoing differentiation remain in the presence of the skewing conditions through the entirety of the assay. Thus, for an siRNA to drive a target from M2-like to M1-like, it must do so in the presence of a continuous strong skewing cocktail. This sets a very high bar for function of these siRNAs as they do not achieve full knockdown, yet significant phenotypic changes are demonstrated. Example 1 demonstrates the expression of traditional macrophage markers CD163, CD16 and CD206, as well biomarkers CD53, PSGL1, and VSIG4. FIG. 1 also shows the natural and significant variability within these markers between individual donors. Also, of note is the difference in expression between M1 differentiated cells and M2 differentiated cells for some markers is less than a 0.5 fold change (FIG. 1A), indicating that even small expression changes can have very dramatic functional consequences. Therefore, targets from Table 1 and Table 2 were considered validated, via siRNA knockdown, when the mean change of a minimum of 4 donors was 10% or greater of either; i) a classic marker, ii) a new biomarker, iii) a combination of classic or new biomarkers, or iv) i, ii, or iii in combination with a morphologic change.

### Example 3: Validation of Targets that Modulate Macrophage Inflammatory Phenotype by Blocking Target Protein

[0953] Macrophages are biologically optimized to either induce or suppress an immune response. Therefore, targeting macrophages via siRNA, antibody, or other modality allows for the alteration of the initiation, suppression and/or perpetuation of immune responses.

[0954] Antibodies to targets validated as described in Example 2 have been identified and generated. Antibodies used in experiments described herein were sourced from commercial vendors or generated recombinantly. For example, antibody variable region sequences were derived from known binders, such as those described in the following sources: U.S. Pat. Publ. No. 2007/0160601, U.S. Pat. Nos. 7,833,530, 7,604,802, and U.S. Pat. Publ. No. 2017/0190782. Antibody variable region sequences are described in Table 6 or produced.

TABLE 6
Antibody variable region sequences

| Antibody | Antibody | |
|---|---|---|
| Name | Region | Sequence |
| AB 5 | VH | EVQLQQSGPDLVKPGALVKISCKASGYSFTAYYIHWVKQSHGKSLEWIGRVNPNTGGTSYN |
| | | PKFKGKAILNVDKSSSTAYMELRSLTSEDSAVYYCARSGSPYYRYDDWGQGTTLTVSS |
| AB 5 | VL | ENVLTQSPAIMSASPGEKVTMTCRASSTVNSTYLHWFQQKSGASPKLWIYGSSNLASGVPA |
| | (kappa) | RFSGSGSGTSYSLTISSVEAEDAATYYCQQYSGYPLTFGAGTTLELK |
| AB 6 | VH | EVQLVETGGGLVQPKGSLKLSCAASGFTFNTNAMNWVRQAPGKGLEWVARIRSKSNNYATY |
| | | YASVKDRFTISRDDTQSMIYLQMNNLKTEDTGMYYCVRGGSYWYFDVWGAGTTVTVSS |
| AB 6 | VL | DVLMTQTPLSLPVSLGDQASISCRSSQSIVNSNGNTYLEWYLQKPGQSPKLLIYKVSNRFS |
| | (kappa) | GVPDRFSGSGSGTDFTLKISRVEAEDLGVYYCFQGSHVPWTFGGGTKLEIK |
| AB 7 | VH | EVQLVESGGGLVQPGGSLRLSCAASGFTFSSFGMHWVRQAPGKGLEWVAYINGGSSTIFYA |
| | | NAVKGRFTISRDNAKNTLYLQMNSLRAEDTAVYYCARASYGGGAMDYWGQGTLVTVSS |
| AB 7 | VL | DIQMTQSPSSLSASBGDRVTITCRSSQSIVHNDGNTYFEWYQQKPGKAPKLLIYKVSNRFS |
| | (kappa) | GVPSRFSGSGSGTHFTLTISSLQPEDFATYYCFQGSYVPLTFGQGTKVEIK |
| AB 8 | VH | QVQLQQSGPGLVKPSQTLSLTCAISGDSVSSNIAAWHWIRLSPSRGLEWLGRTYYRRSKWN |
| | | YDYALSVKSRININPDTSKNLFSLQLNSVTPEDTAVYYCTRGGGRAHSAWGQGTLVTVSS |
| AB 8 | VL | EIVLTQSPGTLSVSPGERATLSCRASQSVSRSHLAWYQQKPGQAPRLLIFGASSRATGIPD |
| | (kappa) | RFSGSGSGTDFTLTISRLEPEDFAVYYCQQYGRPGVTFGQGTKVEIK |
| AB 16 | VH | QVQLVQSGAEVKKPGSSVRVSCKASGGSFSSYGIHWVQQAPGQGLEWMGRIIPVLRIRNYA |
| | | QKFHDRVTIDADTSTGTAYMELSSLTSDDTAVYYCAGSRQGVAPTGYWGQGTMVTVSS |
| AB 16 | VL | QAVLTQPSSLSASPGASASLTCNLRSGIDVGTYRIYWYQQKPGSPPQYLLRYKSDSDKQQG |
| | (lambda) | SGVPSRFSGTKDASANAGILLISGLQSEDEADYYCMIWHSNGWVFGGGTKLTVL |
| AB 18 | VH | EVQLLESGGGLVRPGGSLRLSCAASGFTFSSYAMSWVRQAPGKGLEWVSAISGSGGSTYYA |
| | | DSVKGRFTISRDNSKNTLYLQMNSLRAEDTAVYYCARDKRLTYWGQGTMVTVSS |
| AB 18 | VL | QSVVTQPPSVSAAPGQKVTISCSGSSSNIGNNYVSWYQQLPGTAPKLLIYDNNKRPSGIPD |
| | (lambda) | RFSGSKSGTSATLGITGLQTGDEADYYCGTWDSSLSARVFGGGTKVTVL |
| AB 33 | VH | EVQLQQSGPELVKPGASVKMSCKASGYTFTSYVMHWMKQKPGQGLEWIGYINPYNDGTKYN |
| | | DKFKGKATLTSDKSSSTAYMELSSLTSEDSAVYYCARGSNYEDFAMDYRGQGTSVTVSS |
| AB 33 | VL | DIVMTQSPASQSASLGESVTITCLASQTIGTWLAWYQQKPGKSPQLLIYAATTLADGVPSR |
| | (kappa) | FSGSGSGTKFSFKISSLQAEDFVSYYCQQLYSTPLTFGGGTKVEIK |
| AB 34 | VH | EVQLQQSGPELVKPGASVKVSCKASGYAFTSYNMYWVKQSHGKSLEWIGYIDPYNGGTRHN |
| | | QKFKDKATLTVDKSSSTAYMHLNSLTSEDSAVYYCASQNYEYFDYWGQGTTLTVSS |
| AB 34 | VL | DIVLTQSPKFMSTSVGDRVSITCKASQDVGDAVAWYQQKPGQSPKLLFYWTSTRHTGVPDR |
| | (kappa) | FTGSGSGTEFTLTIRNVQSEDLADYFCQQYRSTPLTFGSGTKVEIK |

[0955] All recombinant antibodies were expressed as human IgG4 chimeras with a S228P heavy chain mutation paired with either kappa or lambda light chain. Variable heavy chain (HC) and light chain (LC) sequences were cloned into vectors containing the antibody constant region sequences shown in Table 7.

TABLE 7
Antibody constant region sequences

| Region | Sequence |
|---|---|
| hIgG4 | ASTKGPSVFPLAPCSRSTSESTAALGCLVKDYFPEPVTVSWNSGALTSGVHTFPAVLQSSGLYSLSSVVTVPSS |
| (S228P) | SLGTKTYTCNVDHKPSNTKVDKRVESKYGPPCPPCPAPEFLGGPSVFLFPPKPKDTLMISRTPEVTCVVVDVSQ |
| | EDPEVQFNWYDGVEVHNAKIKPREEQFNSTYRVVSVLTVLHQDWLNGKEYKCKNVSNKGLPSSIEKTISKAKGQ |
| | PREPQVYTLPFSQEEMTKNQVSLTCLVKGFYPSDIAVEWESNGQPENNYKTTPPVLDSDGSFFLYSRLTVDKSR |
| | WQEGNVFSCSVMHEALHNHYTQKSLSLSLGK |
| hKappa LC | RTVAAPSVFIFPPSDEQLKSGTASVVCLLNNFYPREAKVQWKVDNALQSGNSQESVTEQDSKDSTYSLSSTLTL |
| | SKADYEKHKVYACEVTHQGLSSPVTKSFNRGEC |
| hLambda LC | GQPKAAPSVTLFPPSSEELQANKATLVCLISDFYPGAVTVAWKADSSPVKAGVETTTPSKQSNNKYAASSYLSL |
| | TPEQWKSHRSYSCQVTHEGSTVEKTVAPTECS |

[0956] Protein expression and purification was performed by ATUM (Newark, Calif.), by transient transfection of heavy chain- and light chain-containing proprietary vectors into suspension-adapted HEK293 cells. Cell culture supernatant was purified by protein A affinity chromatography (MabSelect SuRe™ pcc, GE Life Sciences) according to the manufacturer's protocol. Eluted, neutralized proteins were buffer-exchanged into PBS, pH 7.4 (Corning) and filter-sterilized. Purified antibodies were quantified by OD280 using extinction coefficients calculated from the primary amino acid sequence. Purified antibodies were characterized by capillary gel electrophoresis (Perkin Elmer GXII) or SDS-PAGE (Bio-Rad Criterion™ Tris/Glycine/SDS, 4-20%) and HPLC-SEC. Endotoxin levels were also characterized (Charles River Endosafe™).

[0957] Commercial antibodies listed in Table 8 were purchased and used in the assays. In addition, antibodies listed in Table 9 were generated against validated targets described in Example 2 and included in these assays.

TABLE 8
Commercial antibodies

| Antibody Name | Vendor | Clone Name | Antigen |
|---|---|---|---|
| AB 62 | RND Systems | 287219 | LILRB2 |
| AB 63 | BioLegend | WM53 | CD33 |
| AB 64 | BioLegend | KPL-1 | PSGL1 |
| AB 65 | Ebiosciences | 156-4H9 | CD48 |
| AB 66 | NovusBio | 394607 | CD48 |
| AB 67 | RND Systems | 424925 | CD37 |
| AB 68 | Ebiosciences | GE2 | Dectin |
| AB 69 | Merck | Keytruda | PD1 |
| AB 70 | BioLegend | QA16a12 | hIgG1 Isotype |
| AB 71 | BioLegend | QA16A15 | hIgG4 Isotype |
| AB 72 | BioLegend | LN2 | CD74 |
| AB 73 | BioLegend | MOPC-21 | mIgG1 Isotype |
| AB 74 | BioLegend | CD84.1.2 | CD84 |

TABLE 9
ATCC-Deposited Antibodies

| Antibody | ATCC Deposition # | Antigen |
|---|---|---|
| AB 75 | 13H10 | Siglec9 |
| | (PTA-125944) | |
| | (Ike9.m.13H10.hyb.mG1) | |
| AB 76 | 13J19 | Siglec9 |
| | (PTA-125945) | |
| | (Ike9.m.13J19.hyb.mG1) | |
| AB 77 | 18F02 | PSGL1 |
| | (PTA-125946) | |
| | (Hn1.m.18F02.hyb.mG1) | |
| AB 78 | 19I01 | PSGL1 |
| | (PTA-125943) | |
| | (Hn1.m.19I01.hyb.mG1) | |
| AB 79 | 3C01 | LRC25 |
| | (PTA-126026) | |
| | (Lf2.m.FJP5_3C01.hG4) | |
| AB 80 | 1F01 | LRC25 |
| | (PTA-126025) | |
| | (Lf2.m.FJP5_1F01.hG4) | |
| AB 81 | 7A12 | CD53 |
| | (PTA-126029) | |
| | (Px1.m.7A12.hyb.mG2b) | |
| AB 82 | 7F19 | CD53 |
| | (PTA-126030) | |
| | (Px1.m.7F19.hyb.mG2b) | |
| AB 83 | 10M15 | CD53 |
| | (PTA-126027) | |
| | Px1.m.10M15.hyb.mG3 | |
| AB 84 | 4H23 | CD53 |
| | (pTA-126028) | |
| | (Px1.m.4H23.hyb.mG2b) | |

[0958] The generated antibodies to targets validated as described in Example 2 have been utilized in functional assays. The effect of these antibodies on macrophage differentiation state was measured by readouts, including macrophage state-specific biomarkers, cytokine secretion, and other functional characteristics, such as the ability to perpetuate a concerted immune response in complex multi-cellular assays.

[0959] For example, FIG. 4 shows the results of 20 antibodies listed in Tables 6,8, and 9 that were utilized in macrophage differentiation assays.

[0960] Briefly, monocytes were isolated from whole blood of fresh donors by Ficoll separation with RosetteSep™ Human Monocyte Enrichment Cocktail (Stemcell Techhnologies, Vancouver Canada) according to the manufacturer's instructions. Isolated monocytes were arrayed in 24-well plates overnight in Iscove's Modified Dubelcos Media (EWDM) (ThermoFisher) media containing 10% fetal bovine serum and non-adherent cells were washed off after 24 hours. Monocytes were differentiated into macrophages by culturing for 6 days in IMDM 10% FBS plus 50 ng/ml human M-CSF for M2 macrophages, or 50 ng/ml GM-CSF (Biolegend, San Diego, Calif.) for M1 macrophages. M1 macrophages were activated on day 6 with IFN-gamma and LPS, whereas M2 macrophages were polarized on day 6 with 20 ng/ml IL-10 and activated on day 7 with 100 ng/ml LPS. Monoclonal antibodies listed in Tables 6 and 8 were administered at a final concentration of 10 ug/ml on day 1, 3 and 7 of culture. Cells were assessed for expression of M1 and M2 markers as described above and cell free supernatants were collected for analysis. Data are representative of at least 3-4 healthy donors.

[0961] Specific antibodies were able to reverse the skewing towards the M2 phenotype, as determined by both classical and novel biomarkers described herein, such as in Example 1. This is not a pan-functional effect for all antibodies against a target since not all mAbs directed against a given target induced a notable change in macrophage phenotypic markers. Furthermore, antibodies Ab 8 and Ab 18 were able to demonstrate a dose-titratable effect on all of these marker sets (FIG. 4). As above, targets were considered validated, via antibody treatment, when the mean change between a minimum of 4 donors was 10% or greater of either; i) a classic marker, ii) a new biomarker, iii) a combination of classic or new biomarkers, or iv) i, ii, or iii in combination with a morphologic change.

[0962] Beyond phenotypic surface markers, M1 (such as Type 1) and M2 (such as Type 2) macrophages produce different cytokines and chemokines. For example, M1 macrophages produce more pro-inflammatory cytokines, including but not limited to, GM-CSF, IL-12, and TNF alpha, whereas M2 macrophages produce more pro-tumorigenic and immunosuppressive cytokines, such as VEGF, IL-10, and TGFb. This effect can be seen in FIG. 4C where M1-differentiated macrophages produce high levels of pro-inflammatory cytokines as compared to M2 macrophages. Throughout these assays the macrophages are strongly driven, via the presence of potent cytokines IL-10 and M-CSF, to an M2 phenotype. The addition of mAbs that bind to validated targets, throughout the differentiation process, are able to overcome this potent polarization and drive the M2 macrophages to a more M1 like state. This is evidenced by the change in not only classic phenotypic markers but also novel biomarkers, as well as in functional induction of pro-inflammatory cytokine production.

[0963] The ability to effect a response when the siRNA or antibody that is added for the entirety of the differentiation and polarization process has been demonstrated above. In a disease setting, such as a tumor, it is believed that the cells will already be differentiated to some extent along the M2 spectrum. Therefore, in FIGS. 4D-4G, monocytes were polarized to M2 as described above, but antibodies were added only during the last two days of the polarization process. Furthermore, antibodies 77, 78, and 81-84 were dosed at 1 ug/mL rather than the 10 ug/mL that all other mAbs were dosed at as noted above. During this limited window, mAbs 8, 18, and 75-82 were able to dramatically effect polarization of M2 macrophages to a more M1-like state as demonstrated by the increase in pro-inflammatory cytokines. As demonstrated in Example 2, down-regulation versus siRNA knockdown of some targets led the macrophages to achieve a more M2-like immunosuppresive phenotype. mAbs 83 and 84 demonstrate the ability to recapitulate this functional effect via target blocking with mAbs.

[0964] These figures demonstrate the ability of antibodies to validated targets to reverse both the phenotype, as well as functional characteristics, of M2 macrophages to make them more M1-like, as well as drive macrophages to a more immunosuppresive M2 like phenotype.

### Example 4: Validation of Targets that Modulate Macrophage Inflammatory Phenotype Using Complex Multicellular Assays

[0965] In order for macrophages to induce tumor immunogenicity or reverse the course of autoimmune and inflammatory disorders, they generally should able to induce or block a concerted immune response. This would include having direct and downstream effects on both myeloid and lymphoid cells. Complex multi-cellular assays consisting of primary cells from both the lymphoid and myeloid lineage are needed to analyze such effects.

[0966] Several systems have been utilized to demonstrate the ability of validated targets described herein to lead to a concerted immune response, including a Staphylococcal enterotoxin B (SEB) assay and a mixed lymphocyte reaction (MLR) assay. These assays take advantage of primary human cells, which are the most natural cells to study and have the best predictive power for in vivo disease, such as human disease. These assays naturally have high variability from donor to donor both in the amplitude of background activity and response.

[0967] For the SEB assay, peripheral blood mononuclear cells (PBMCs) were isolated from blood of fresh donors by Ficoll® separation and frozen in 90% fetal bovine serum (FBS), 10% DMSO at −150° C. for long term storage. PBMCs were thawed into complete RPMI media containing 10% FBS, 50 nM 2-mercaptoethanol, non-essential amino acids, 1 mM sodium pyruvate, and 10 mM HEPES. Next, 200,000 cells were plated in each well of a 96-well plate in complete RPMI. Anti-human PD-1 pembrolizumab (Merck, KEYTRUDA®, MK-3475) was added at 5 μg/ml and other antibodies indicated in Tables 6-9 were added at 10 μg/ml as indicated with the exception of mAbs 77, 78, and 81-84, which were added at 1 ug/mL. Cells and mAbs were incubated at 37° C. for 30 minutes and Staphylococcal enterotoxin B (SEB) (EMD Millipore, Billerica, Mass.) was added at a final concentration of 0.1 μg/ml. After 4 days of activation, supernatant was collected and frozen at −20° C. Cytokine concentration was measured using multi-parameter ProcartaPlex™ Assay (ThermoFisher Scientific). Data are representative of at least 4 healthy donors.

[0968] For the MLR assay, monocytes and T cells were isolated from MHC-mismatched donors by first isolating PBMCs from whole blood by gradient centrifugation over Ficoll® Paque Plus (GE Healthcare, Chicago Ill.). Monocytes were isolated from PBMC using the EasySep™ Human Monocyte Enrichment Kit without CD16 depletion (StemCell Technologies, Vancouver Canada) according to the manufacturer's manual. When indicated, monocytes were differentiated into M2 macrophages in the presence of antibodies as described above. T cells were isolated from PBMCs using the EasySep™ Human T Cell Isolation Kit (StemCell Technologies, Vancouver Canada) according to the manufacturer's manual. Allogeneic mixed lymphocyte reactions were set up by plating 20,000 monocytes (M0) in U bottom 96-well plates and pre-incubating them with 1 ug/mL of the indicated antibody at 37° C. for 30 min. Then, 50,000 T cells were added to each well and cells were incubated in a humidified incubator at 37° C./5% CO2 for 3 days. Culture media was IMDM+10% FCS (fetal calf serum). On day 3, cells were re-stimulated for 4 h using the T Cell Activation Cocktail with brefeldin A (BioLegend, San Diego, Calif.) according to the manufacturer's manual. Where indicated, supernatant was collected and T cells were analyzed by flow cytometry on an Attune flow cytometer (Thermo Fisher Scientific, Waltham, Mass.) and analyzed using FlowJo Software (BD Bioscience, San Jose, Calif.). Cytokines from supernatant were measured using a Luminex panel (Thermo Fisher, Waltham, Mass.) according to the manufacturer's protocol. Luminescence was detected using a Cytation 5 Imaging Reader (Biotek, Winooski, Vt.). Data were presented as normalized to isotype control groups.

[0969] In these assays, specific antibodies to validated targets were demonstrated to be able to impact a concerted multi-cellular immune response. This concerted multi-cellular response included not only altering the phenotype and function of myeloid cells as previously demonstrated but also the functional output of lymphoid cells, specifically T cells. The results of SEB assays are shown in FIG. 5. FIG. 5A demonstrates T cell specific intra-cellular staining of IFNγ. As can be seen specific validated mAbs are able to increase IFNγ above control levels. FIGS. 5B and 5C demonstrate secreted cytokine levels from the SEB assay. Treatment with validated mAbs led to changes in the production of myeloid-derived cytokines and chemokines (e.g., IL-1B, GM-CSF, and CCL3.4) and T cell derived cytokines (e.g., IL-2, IFNγ, and IL-10). This clearly indicates that mAbs that were validated to drive macrophages to a more pro-inflammatory M1-like state can have a consistent effect in multi-cellular assay and increase inflammatory cytokines, as well as mAbs that were validated to drive macrophages to a more immunosuppressive state recapitulated that effect in a complex multi-cellular assay.

[0970] FIG. 6 shows the results from MLR experiments, where two distinct responses are shown. FIG. 6A shows intra-cellular flow staining for IFNγ and Granzyme B from T cells. Intracellular staining was conducted as described above with the inclusion of a fixation and permeabilization step. Staining for intracellular epitopes was performed using the BD Cytofix/Cytoperm™ Fixation/Permeabilization Kit according to the manufacturer's protocol. In this assay, some mAbs were able to effect a decrease in T cell function. Given that the MLR assay mimics an inflammatory GVHD type reaction, the results demonstrate a potential for using the macrophage associated targets in a setting where decreasing inflammation is warranted or desired. FIG. 6B shows the other distinct response with mAbs that have previously demonstrated the ability to drive M2 macrophages to a more M1-like state. An increase in both lymphoid- and myeloid-derived cytokines was determined, which is reminiscent of what was determined in the SEB assay. Both of these assays clearly demonstrate the potential of modulating macrophage associated targets to alter both macrophage function, as well as T cell function, and thereby elicit a concerted immune response.

### Example 5: Macrophage Inflammatory Phenotype Modulation by Modulating Validated Targets as Compared to Immune Checkpoint Inhibitor Treatment

[0971] Checkpoint inhibitors, e.g., PD-1 blocking antibodies, are currently the gold standard immuno-oncology therapeutic. Traditionally checkpoint inhibitors have focused on blocking inhibitory receptors expressed directly on T cells and thereby directly increasing T cell activity against tumors. The targets that have been shown to be validated above have been shown to alter first the phenotype and function of macrophages and then lead to a concerted immune response, including T cell activation. Therefore, the ability of these macrophage associated targets to function equal to or better than checkpoint inhibitors or potentially combine with needs to be confirmed.

[0972] The ability of validated targets to function equal to or better than checkpoint inhibitors, including in instances where checkpoint inhibitors do not work, is demonstrated in FIG. 5. In this assay, two donors are shown. The assay was performed as described in SEB assay above. For example, PD1 blockade (e.g., using pembrolizumab) in donor 5 resulted in an increase in T cell-specific response as indicated by IFNg production, whereas in donor 2 there was no increase in T cell activity in the presence of PD1 blockade. In both donor 2 and donor 5, specific antibodies were able to induce both T cell- and myeloid cell-specific responses. Furthermore, the combination of PD1 blockade with validated target antibodies led to an additive response, indicating efficacy of anti-target therapeutics use, either alone or in combination with checkpoint inhibitors.

### Example 6: Expression and Function of Macrophage-Associated Targets in the Tumor Microenvironment

[0973] Validated macrophage-associated targets were tested for their expression on tumor associated macrophages (TAMs) (FIG. 7). Flow cytometry was performed as described above. Macrophage-associated targets were demonstrated to be expressed on TAMs, such as those from lung, tumors, kidney tumors and the cellular constituents of ascites fluid from gynecological cancers (FIG. 7B). Consistent robust expression of these validated macrophage-associated targets is seen across different tumor types and systems.

[0974] The above in vitro systems clearly show the ability of these validated macrophage-associated targets to alter macrophage function as well as complex multi-cellular assays including T cells. These data were further confirmed using patient tumor material in an ex vivo culture system. This type of system represents a close and generally accepted surrogate to a human in vivo study, therefore providing potent evidence of therapeutic benefit. The macrophage-associated targets were further tested for their regulation of the biology of macrophages in a tissue environment using several independent systems.

[0975] One system used for this purpose was a dissociated tumor assay. Dissociated tumors contain all the various cell populations present in the tumor microenvironment, including, for example, tumor cells, immune cells, and support cells. These viable single cell suspensions are useful for many applications and allow for the normalization of cell number and composition within each replicate of an experiment. For performing dissociated tumor experiments upon acquisition of fresh tumor tissue (less than 24 hrs), surrounding fat, fibrous areas, and necrotic areas were removed from a tumor sample using scissors and scalpels. The tumor was cut into small pieces of 2-4 mm³. The Tumor Dissociation Kit enzyme mix (MACS Miltenyi Biotec) was prepared according to the manufacturer's protocol. Tumor pieces and dissociation enzymes were transferred into 5 ml Snaplock Microcentrifuge tubes and the tissue was minced using a pair of straight scissors. Tubes were placed in a 37° C. shaker at 200-250 rpm for 45 minutes to 1 hour. At the end of the incubation time, the digested tumor was filtered through 40 uM cell strainers into 50 mL Falcon™ conical centrifuge tubes. The tube was filled with cold 2%-5% FBS/PBS mix to stop the digestion. All of the remaining steps were performed on ice. In particular, the tube was centrifuged for 5 minutes at 300 g, the supernatant was discarded, and the cells were washed twice with cold 2% to 5% FBS/PBS mix. Following the last wash, the cells were resuspended in 1 to 5 ml of cold 2% to 5% FBS/PBS mix and a cell count was performed. Approximately 300 k to 400 k cells were plated in each well of 6-well culture plates containing 1 ml of media (DMEM with L-glutamine, 4.5 g/L glucose and sodium pyruvate (Fisher Scientific), Gibco™ GutaMAX® supplement (Fisher Scientific), Gibco™ MEM Non-Essential Amino Acids Solution (Fisher Scientific), 2-mercaptoethanol (55 mM) (Fisher Scientific), heat inactivated from human male AB plasma (Sigma-Aldrich, Inc), bovine calf serum heat inactivated (BioFluid Technologies), 100× pen/strep, and human M-CSF (BioLegend)) and indicated antibodies. All antibodies were added at a concentration of 10 ug/mL. Plates were incubated in a cell culture incubator at 37° C. with 5% CO₂ for 24 or 48 hrs. At the end of the study, cytokines/chemokines in the culture supernatant were measured using the Invitrogen™ Luminex™ Cytokine Human Magnetic 25-Plex Panel according to the manufacturer's instructions.

[0976] Tumor samples treated with specific antibodies, as well as pembrolizumab (KEYTRUDA®) are shown in FIG. 8. The data described herein presents 34 (FIGS. 8A-8C) or 11 (FIG. 8D) individual tumors comprising 6 tumor types. The data demonstrate the ability of antibodies against validated macrophage-associated targets to induce M1-like pro-inflammatory function within TAMs, as shown by the production of TNFα, GM-CSF, and IL-12. This assay also demonstrates the potential to elicit a concerted immune response within a tumor beyond macrophage function as shown by the production of cytokines such as IFNg. This is a significant finding as it demonstrates that administering a single agent directed at a surface receptor, in an immunosuppressive environment, modulating myeloid cells and, in turn, effecting a T cell response, thereby demonstrating the potential to drive an M2- to M1-like differentiation in a tumor and induce an anti-tumor response. This potent concerted immune response is directly compared to pembrolizumab (KEYTRUDA®) response and the results demonstrate that modulating the macrophage-associated targets can have a dramatically more potent response demonstrating efficacious use of a single agent therapy directed at validated targets. Additionally, the effect of macrophage-associated targets is seen in cases where pembrolizumab (KEYTRUDA®) is not obvious, paving the way to expanding the responder population. Selected antibodies have also been combined with pembrolizumab (KEYTRUDA®) and show an additive effect demonstrating combination therapies to increase efficacy and/or overcome resistance to checkpoint therapies. It should also be noted that pembrolizumab (KEYTRUDA®) induces immunosuppressive IL-10 in addition to stimulating IFNg production, which can limit its activity, while our target engagement has not stimulated immunosuppressive IL-10. There are also clear instances of significant upregulation of chemokines, which is believed to recruit fresh immune cells to further perpetuate an anti-tumor immune response.

[0977] A second system was used to further confirm the results of the dissociated tumor assays. Briefly, dissociated tumor assays have the advantage of being able to normalize the number of cells in every condition performed. They also have the potential downside of losing the tumor structure and non-cellular stromal components. In order to address this question and demonstrate the ability of validated targets to induce a concerted immune response in an intact tumor, tissue slice cultures were performed. Upon acquisition of fresh tumor tissue sample (less than 24 hrs), surrounding fat, fibrous, and necrotic areas were removed from the tumor sample as much as possible using scissors and scalpels. The tissue was embedded in the center of a tissue mold using 4% agarose. After solidifying, the agarose block was dislodged, and the mold was glued to a Leica VT1000 S microtome tissue holder and sectioned into 300 to 400 micron sections using the Leica VT1000 S microtome. Tissue slices were transferred to a cell culture insert and then into a well of a 6-well cell culture plate containing media (DMEM with L-Glutamine, 4.5 g/L glucose and sodium pyruvate (Fisher Scientific), Gibco™ GlutaMAX™ Supplement (Fisher Scientific), Gibcom MEM Non-Essential Amino Acids Solution (Fisher Scientific), 2-mercaptoethanol (55 mM) (Fisher Scientific), heat inactivated from human male AB plasma (Sigma-Aldrich, Inc), bovine calf serum heat inactivated (BioFluid Technologies), 100× pen/strep, and human M-CSF (BioLegend)) and indicated antibodies. All antibodies were added at a concentration of 10 ug/mL. The slices were then incubated at 37° C. with 5% CO₂ for 1-5 days. At the end of the study, efficacy was evaluated by analyzing cytokine/chemokine amounts secreted into the culture supernatant measured using the Invitrogen™ Luminex™ Cytokine Human Magnetic 25-Plex Panel according to the manufacturer's instructions. If a tumor tissue sample was not appropriate to be sliced using a Leica VT1000 S microtome, it was cut using scalpels as thinly as possible and the slices were subsequently treated as described above. For all samples, a slice was taken prior to treatment and utilized for immunophenotyping. This slice was dissociated as described above and stained for flow cytometry analyses as described above.

[0978] FIG. 8 demonstrates the function of selected antibodies across multiple tumor types and donors. In this figure, results from 6 different tumors, including kidney, lung, and GI tumors, were combined for each treatment. The induction of a pro-inflammatory response was consistent and significant, thereby demonstrating broad function and applicability. These various tumors are composed of both highly infiltrated examples and minimally infiltrated tumors, as demonstrated in FIG. 10A-C. These results further demonstrate that antibodies against validated targets can induce a potent pro-inflammatory, and likely anti-tumor, immune response within the tumor microenvironment. This effect can be equal to or greater than that of pembrolizumab (KEYTRUDA®), including in tumors with very low or absent T cell infiltrate.

[0979] FIGS. 9A-9C show the cytokine production resulting from 3 separate tumor types treated with antibodies, as well as with validated siRNAs, described above. In all 3 independent samples, the modulation of the validated macrophage-associated targets with either antibody or siRNA induced a pro-inflammatory immune response, including both myeloid and lymphoid specific responses.

[0980] FIGS. 9A and 9B also demonstrate two different responses with regard to PD1 blockade. The lung tumor assay (FIG. 9A) showed a response to pembrolizumab (KEYTRUDA®) with anticipated cytokines, such as IFNg and TNFα, being produced. Selected antibodies to targets in this tumor elicited an equal or greater response than that of pembrolizumab (KEYTRUDA®) treatment. The GI tumor results shown in FIG. 9B do not provide a response elicited by pembrolizumab (KEYTRUDA®). Importantly, immunophenotyping of this tumor showed a significant population of PD1+CD8 T cells (FIG. 10A)—a necessary, but not sufficient, feature for the PD-1 response. In this tumor, the antibodies shown were still able to elicit a response from both myeloid cells, as demonstrated by the production of CCL3, CCL4, and GM-CSF, and T cells, as demonstrated by the production of IFNg.

[0981] Thus, the representative examples of at least the following are provided: a) in T cell infiltrated tumors, validated macrophage-associated target (VTx) monotherapy or combination therapy leads to a stronger activation of T cells and macrophages than pembrolizumab (KEYTRUDA®); b) in T cell infiltrated tumors, VTx monotherapy or combination can lead to activation of both T cells and macrophages when pembrolizumab (KEYTRUDA®) does not; c) in tumors with none/very poor T cell infiltration, VTx monotherapy or combination can lead to broad inflammatory changes in the tumor microenvironment; and clear achievement of additivity and potential synergy to immune checkpoint inhibition.

[0982] Without being bound by theory, it is believed that macrophages as influenced by their inflammatory state modulate immune responses due to their presence not limited to antigen-specific interactions like other immune cells. Accordingly, the ability to elicit an immune response across all of these levels of immune infiltration demonstrates a wide applicability across tumor types and immune status. About a quarter of all human cancers are considered to be an immune desert, whereas the remainder are infiltrated by immune cells. While only a minority of those tumors have a full immune surveillance by T cells, all of them have a significant infiltration by both surveilling (pro-inflammatory) and tumor supporting (pro-tumorigenic) macrophages. FIG. 11 shows a distribution of macrophage-infiltrating tumors across cancer types of the large public dataset of human cancers (TCGA, The Cancer Genome Atlas, 2017 version, processed and distributed by OmicSoft/Qiagen). Tumor infiltration is measured by the presence of a canonical myeloid marker CD11b above the cutoff. The cutoff is defined as a first quartile of the CD11b mRNA expression distribution across all primary tumors in the dataset. These macrophage-infiltrating tumors are believed to be particularly useful for modulation according to the compositions and methods described herein.

### Biological Deposits

[0983] Representative materials of the present invention were deposited in the American Type Culture Collection (ATCC) on Jun. 4, 2019 and Jun. 20, 2019 by Verseau Therapeutics, Inc. In particular, monoclonal antibodies deposited as individual deposits having the following names: “13H10” (PTA-125944), “13J19” (PTA-125945), “18F02” (PTA-125946), and “19I01” (PTA-125943), and having identifying characteristics shown in Table 9 and the Examples, were deposited in the ATCC on Jun. 4, 2019 by Verseau Therapeutics, Inc. under the provisions of the Budapest Treaty on the International Recognition of the Deposit of Microorganisms for the Purpose of patent Procedure and Regulations thereunder (Budapest Treaty). Similarly, monoclonal antibodies deposited as individual deposits having the following names: “1F01” (PTA-126025), “3C01” (PTA-126026), “10M15” (PTA-126027), “4H23” (PTA-126028), “7A12” (PTA-126029), and “7F19” (PTA-126030), and having identifying characteristics shown in Table 9 and the Examples, were deposited in the ATCC on Jun. 20, 2019 by Verseau Therapeutics, Inc. under the provisions of the Budapest Treaty on the International Recognition of the Deposit of Microorganisms for the Purpose of patent Procedure and Regulations thereunder (Budapest Treaty). This assures maintenance of a viable deposit for 30 years from the date of deposit. The deposit will be made available by ATCC under the terms of the Budapest Treaty, and subject to an agreement between Verseau Therapeutics, Inc. and ATCC, which assures permanent and unrestricted availability of the deposit to the public upon issuance of the pertinent U.S. patent or upon laying open to the public of any U.S. or foreign patent application, whichever comes first, and assures availability of the deposit to one determined by the U.S. Commissioner of Patents and Trademarks to be entitled thereto according to 35 U.S.C. Section 122 and the Commissioner's rules pursuant thereto (including 37 C.F.R. Section 1.14 with particular reference to 886 OG 638).

[0984] The assignee of the present application has agreed that if a deposit should be lost or destroyed, the materials will be promptly replaced on notification with another of the same. Availability of the deposited material is not to be construed as a license to practice the invention in contravention of the rights granted under the authority of any government in accordance with its patent laws.

### INCORPORATION BY REFERENCE

[0985] All publications, patents, and patent applications mentioned herein are hereby incorporated by reference in their entirety as if each individual publication, patent or patent application was specifically and individually indicated to be incorporated by reference. In case of conflict, the present application, including any definitions herein, will control.

[0986] Also incorporated by reference in their entirety are any polynucleotide and polypeptide sequences which reference an accession number correlating to an entry in a public database, such as those maintained by The Institute for Genomic Research (TIGR) on the World Wide Web and/or the National Center for Biotechnology Information (NCBI) on the World Wide Web.

### EQUIVALENTS AND SCOPE

[0987] The details of one or more embodiments encompassed by the present invention are set forth in the description above. Although the preferred materials and methods have been described above, any materials and methods similar or equivalent to those described herein can be used in the practice or testing of embodiments encompassed by the present invention. Other features, objects and advantages related to the present invention are apparent from the description. Unless defined otherwise, all technical and scientific terms used herein have the same meaning as commonly understood by one of ordinary skill in the art to which this invention belongs. In the case of conflict, the present description provided above will control.

[0988] Those skilled in the art will recognize or be able to ascertain using no more than routine experimentation, many equivalents to the specific embodiments encompassed by the present invention described herein. The scope of the present invention is not intended to be limited to the description provided herein and such equivalents are intended to be encompassed by the appended claims.

[0989] The articles “a” and “an” are used herein to refer to one or to more than one (i.e. to at least one) of the grammatical object of the article unless indicated to the contrary or otherwise evident from the context. By way of example, “an element” means one element or more than one element. Claims or descriptions that include “or” between one or more members of a group are considered satisfied if one, more than one, or all of the group members are present in, employed in, or otherwise relevant to a given product or process unless indicated to the contrary or otherwise evident from the context. The present invention includes embodiments in which exactly one member of the group is present in, employed in, or otherwise relevant to a given product or process. The present invention also includes embodiments in which more than one, or the entire group members are present in, employed in, or otherwise relevant to a given product or process.

[0990] It is also noted that the term “comprising” is intended to be open and permits but does not require the inclusion of additional elements or steps. When the term “comprising” is used herein, the term “consisting of” is thus also encompassed and disclosed.

[0991] Where ranges are given, endpoints are included. Furthermore, it is to be understood that unless otherwise indicated or otherwise evident from the context and understanding of one of ordinary skill in the art, values that are expressed as ranges can assume any specific value or subrange within the stated ranges in different embodiments encompassed by the present invention, to the tenth of the unit of the lower limit of the range, unless the context clearly dictates otherwise.

[0992] In addition, it is to be understood that any particular embodiment of the present invention that falls within the prior art can be explicitly excluded from any one or more of the claims. Since such embodiments are deemed to be known to one of ordinary skill in the art, they can be excluded even if the exclusion is not set forth explicitly herein. Any particular embodiment of the compositions encompassed by the present invention (e.g., any antibiotic, therapeutic or active ingredient, any method of production; any method of use; etc.) can be excluded from any one or more claims, for any reason, whether or not related to the existence of prior art.

[0993] It is to be understood that the words which have been used are words of description rather than limitation, and that changes can be made within the purview of the appended claims without departing from the true scope and spirit encompassed by the present invention in its broader aspects.

[0994] While the present invention has been described at some length and with some particularity with respect to several described embodiments, it is not intended that it should be limited to any such particulars or embodiments or any particular embodiment, but it is to be construed with references to the appended claims so as to provide the broadest possible interpretation of such claims in view of the prior art and, therefore, to effectively encompass the intended scope of the present invention.

The application's sequence listing, which the Patent Office published only in electronic form, follows.

SEQUENCE LISTING (730 sequences)

SEQ ID NO: 1 - DNA, 1600 bp, Homo sapiens
tagggcctcctctaagtcttgagcccgcagttcctgagagaagaaccctgaggaacagacgttccctcgcggccctggcacctctaaccccagacatgctgctgctgctgctgcccctgctctgggggagggagagggcggaaggacagacaagtaaactgctgacgatgcagagttccgtgacggtgcaggaaggcctgtgtgtccatgtgccctgctccttctcctacccctcgcatggctggatttaccctggcccagtagttcatggctactggttccgggaaggggccaatacagaccaggatgctccagtggccacaaacaacccagctcgggcagtgtgggaggagactcgggaccgattccacctccttggggacccacataccaagaattgcaccctgagcatcagagatgccagaagaagtgatgcggggagatacttctttcgtatggagaaaggaagtataaaatggaattataaacatcaccggctctctgtgaatgtgacagccttgacccacaggcccaacatcctcatcccaggcaccctggagtccggctgcccccagaatctgacctgctctgtgccctgggcctgtgagcaggggacaccccctatgatctcctggatagggacctccgtgtcccccctggacccctccaccacccgctcctcggtgctcaccctcatcccacagccccaggaccatggcaccagcctcacctgtcaggtgaccttccctggggccagcgtgaccacgaacaagaccgtccatctcaacgtgtcctacccgcctcagaacttgaccatgactgtcttccaaggagacggcacagtatccacagtcttgggaaatggctcatctctgtcactcccagagggccagtctctgcgcctggtctgtgcagttgatgcagttgacagcaatccccctgccaggctgagcctgagctggagaggcctgaccctgtgcccctcacagccctcaaacccgggggtgctggagctgccttgggtgcacctgagggatgcagctgaattcacctgcagagctcagaaccctctcggctctcagcaggtctacctgaacgtctccctgcagagcaaagccacatcaggagtgactcagggggtggtcgggggagctggagccacagccctggtcttcctgtccttctgcgtcatcttcgttgtagtgaggtcctgcaggaagaaatcggcaaggccagcagcgggcgtgggagatacgggcatagaggatgcaaacgctgtcaggggttcagcctctcagatcttgaatcattttattggatttcctacattccttggactgggtttcgagtttctcctgaatctccgtgatctttgttgccatccagattctgaattctatgtctatcatttcagtcatttcagactcattaagaacattgctggggagatagtgtggtcacttgaaggtaaaatactctggcttttggatgtgtcagatttctttcactggttcttcctcatctgtgtgggctgatgttcctttaatctttgaagttgctgttctttggatagggctctttgcttttatattctctgatg

SEQ ID NO: 2 - protein, 479 aa, Homo sapiens
MLLLLLPLLWGRERAEGQTSKLLTMQSSVTVQEGLCVHVPCSFSYPSHGWIYPGPVVHGYWFREGANTDQDAPVATNNPARAVWEETRDRFHLLGDPHTKNCTLSIRDARRSDAGRYFFRMEKGSIKWNYKHHRLSVNVTALTHRPNILIPGTLESGCPQNLTCSVPWACEQGTPPMISWIGTSVSPLDPSTTRSSVLTLIPQPQDHGTSLTCQVTFPGASVTTNKTVHLNVSYPPQNLTMTVFQGDGTVSTVLGNGSSLSLPEGQSLRLVCAVDAVDSNPPARLSLSWRGLTLCPSQPSNPGVLELPWVHLRDAAEFTCRAQNPLGSQQVYLNVSLQSKATSGVTQGVVGGAGATALVFLSFCVIFVVVRSCRKKSARPAAGVGDTGIEDANAVRGSASQILNHFIGFPTFLGLGFEFLLNLRDLCCHPDSEFYVYHFSHFRLIKNIAGEIVWSLEGKILWLLDVSDFFHWFFLICVG

SEQ ID NO: 3 - DNA, 1737 bp, Homo sapiens
tagggcctcctctaagtcttgagcccgcagttcctgagagaagaaccctgaggaacagacgttccctcgcggccctggcacctctaaccccagacatgctgctgctgctgctgcccctgctctgggggagggagagggcggaaggacagacaagtaaactgctgacgatgcagagttccgtgacggtgcaggaaggcctgtgtgtccatgtgccctgctccttctcctacccctcgcatggctggatttaccctggcccagtagttcatggctactggttccgggaaggggccaatacagaccaggatgctccagtggccacaaacaacccagctcgggcagtgtgggaggagactcgggaccgattccacctccttggggacccacataccaagaattgcaccctgagcatcagagatgccagaagaagtgatgcggggagatacttctttcgtatggagaaaggaagtataaaatggaattataaacatcaccggctctctgtgaatgtgacagccttgacccacaggcccaacatcctcatcccaggcaccctggagtccggctgcccccagaatctgacctgctctgtgccctgggcctgtgagcaggggacaccccctatgatctcctggatagggacctccgtgtcccccctggacccctccaccacccgctcctcggtgctcaccctcatcccacagccccaggaccatggcaccagcctcacctgtcaggtgaccttccctggggccagcgtgaccacgaacaagaccgtccatctcaacgtgtcctacccgcctcagaacttgaccatgactgtcttccaaggagacggcacagtatccacagtcttgggaaatggctcatctctgtcactcccagagggccagtctctgcgcctggtctgtgcagttgatgcagttgacagcaatccccctgccaggctgagcctgagctggagaggcctgaccctgtgcccctcacagccctcaaacccgggggtgctggagctgccttgggtgcacctgagggatgcagctgaattcacctgcagagctcagaaccctctcggctctcagcaggtctacctgaacgtctccctgcagagcaaagccacatcaggagtgactcagggggtggtcgggggagctggagccacagccctggtcttcctgtccttctgcgtcatcttcgttgtagtgaggtcctgcaggaagaaatcggcaaggccagcagcgggcgtgggagatacgggcatagaggatgcaaacgctgtcaggggttcagcctctcaggggcccctgactgaaccttgggcagaagacagtcccccagaccagcctcccccagcttctgcccgctcctcagtgggggaaggagagctccagtatgcatccctcagcttccagatggtgaagccttgggactcgcggggacaggaggccactgacaccgagtactcggagatcaagatccacagatgagaaactgcagagactcaccctgattgagggatcacagcccctccaggcaagggagaagtcagaggctgattcttgtagaattaacagccctcaacgtgatgagctatgataacactatgaattatgtgcagagtgaaaagcacacaggctttagagtcaaagtatctcaaacctgaatccacactgtgccctcccttttatttttttaactaaaagacagacaaattcctaaaaaaaaaaaaaaaaaaaa

SEQ ID NO: 4 - protein, 463 aa, Homo sapiens
MLLLLLPLLWGRERAEGQTSKLLTMQSSVTVQEGLCVHVPCSFSYPSHGWIYPGPVVHGYWFREGANTDQDAPVATNNPARAVWEETRDRFHLLGDPHTKNCTLSIRDARRSDAGRYFFRMEKGSIKWNYKHHRLSVNVTALTHRPNILIPGTLESGCPQNLTCSVPWACEQGTPPMISWIGTSVSPLDPSTTRSSVLTLIPQPQDHGTSLTCQVTFPGASVTTNKTVHLNVSYPPQNLTMTVFQGDGTVSTVLGNGSSLSLPEGQSLRLVCAVDAVDSNPPARLSLSWRGLTLCPSQPSNPGVLELPWVHLRDAAEFTCRAQNPLGSQQVYLNVSLQSKATSGVTQGVVGGAGATALVFLSFCVIFVVVRSCRKKSARPAAGVGDTGIEDANAVRGSASQGPLTEPWAEDSPPDQPPPASARSSVGEGELQYASLSFQMVKPWDSRGQEATDTEYSEIKIHR

SEQ ID NO: 5 - DNA, 1849 bp, Mus musculus
agagcctggagagacagttttagctggacatgctgctgttgctgctgctgctgctgctctgggggataaagggtgtggagggtcagaacccccaagaggttttcaccctgaatgtggaaaggaaggtggtggtgcaggagggcctgtgtgtccttgtgccctgtaacttctcctatctcaagaagaggttgactgactggactgactcagacccagttcatggattctggtacagggaaggaaccgacagacgcaaagattccatcgtggccacaaataacccaattcgtaaagcagtgaaggaaacccggaatcgattcttcctgctcggagacccttggaggaatgactgctccctgaacatcagagagatcagaaagaaggatgcggggttatacttctttcgcctggagcgtggaaaaacaaagtataattacatgtgggacaagatgactctggttgtaacagccctcactaacaccccccaaattcttctcccggagacgcttgaagctggccatcccagcaacctgacctgctctgtgccttgggactgtgggtggacggcacctcccatcttctcctggactggtacctctgtgtcatttttgagcaccaacactacgggttcctcagtgctaaccatcacccctcagcctcaggaccatggcaccaacctcacttgtcaggtgaccctgcctggaactaatgtgtccacaagaatgaccatccgtctcaacgtgtcatatgctccaaagaatctgactgtgaccatctatcaaggagctgactcagtttccacaatcctgaagaatggctcatctcttcctatctctgagggccagtcactgcgtctcatctgcagcaccgacagctatccccctgcgaacctaagctggtcctgggataacctgaccctgtgcccatcaaagttgtccaagcccgggctcctggagctgtttccagtgcatcttaagcacggaggagtgtatacctgccaagctcaacatgccctgggctcccaacacatttccttgagcctgtctccacagagcagtgcaactttatctgaaatgatgatggggacctttgtgggttcaggagtcacagccctccttttcctgtctgtctgcatcctcctcctggcagtaagatcctacaggaggaaaccagccaggccagctgtggtagctccgcacccagatgccctcaaggtctcagtttctcagaatcccctggttgaatcccaggcagatgacagctctgagcccctgccttccatacttgaggcggccccctcctccacagaggaagagatacattatgcgaccctcagctttcacgagatgaagcccatgaacctgtgggggcaacaggacactaccacggagtactcagagataaagtttccacaaaggaccgcatggccatgaccgtggctggagaaagcatggtggccccaggaggctggctctggagaaggaaagagtcacctaggttgacatgtgatacacagggcttcagagccattccttctgtgacacaggcgttctgtgctgcccatgcccctgtgctgccctgtccacacaactgctattgtgccctgggaatcataagcttgacctttttactcctcttctccccttcccctccttccccgccccctcttctcctcctcctctctcccctctcctcccctcttccttttgttttttccaagacagggtttctctgtgtagccttggctgtcctagaacttgctctgcagaccagactgcccttgaactcttctttccaagtgctgggattaaagatgtgcaccaccacccagcacttgactttattgtaa

SEQ ID NO: 6 - protein, 467 aa, Mus musculus
MLLLLLLLLLWGIKGVEGQNPQEVFTLNVERKVVVQEGLCVLVPCNFSYLKKRLTDWTDSDPVHGFWYREGTDRRKDSIVATNNPIRKAVKETRNRFFLLGDPWRNDCSLNIREIRKKDAGLYFFRLERGKTKYNYMWDKMTLVVTALTNTPQILLPETLEAGHPSNLTCSVPWDCGWTAPPIFSWTGTSVSFLSTNTTGSSVLTITPQPQDHGTNLTCQVTLPGTNVSTRMTIRLNVSYAPKNLTVTIYQGADSVSTILKNGSSLPISEGQSLRLICSTDSYPPANLSWSWDNLTLCPSKLSKPGLLELFPVHLKHGGVYTCQAQHALGSQHISLSLSPQSSATLSEMMMGTFVGSGVTALLFLSVCILLLAVRSYRRKPARPAVVAPHPDALKVSVSQNPLVESQADDSSEPLPSILEAAPSSTEEEIHYATLSFHEMKPMNLWGQQDTTTEYSEIKFPQRTAWP

SEQ ID NO: 7 - DNA, 1869 bp, Homo sapiens
ggagtttgagtgagagatatagggaaggaagggaagtaagcagtcacagacgctggcggccaccagaagtttgagcctctttggtagcaggaggctggaagaaaggacagaagtagctctggctgtgatggggatcttactgggcctgctactcctggggcacctaacagtggacacttatggccgtcccatcctggaagtgccagagagtgtaacaggaccttggaaaggggatgtgaatcttccctgcacctatgaccccctgcaaggctacacccaagtcttggtgaagtggctggtacaacgtggctcagaccctgtcaccatctttctacgtgactcttctggagaccatatccagcaggcaaagtaccagggccgcctgcatgtgagccacaaggttccaggagatgtatccctccaattgagcaccctggagatggatgaccggagccactacacgtgtgaagtcacctggcagactcctgatggcaaccaagtcgtgagagataagattactgagctccgtgtccagaaactctctgtctccaagcccacagtgacaactggcagcggttatggcttcacggtgccccagggaatgaggattagccttcaatgccaggctcggggttctcctcccatcagttatatttggtataagcaacagactaataaccaggaacccatcaaagtagcaaccctaagtaccttactcttcaagcctgcggtgatagccgactcaggctcctatttctgcactgccaagggccaggttggctctgagcagcacagcgacattgtgaagtttgtggtcaaagactcctcaaagctactcaagaccaagactgaggcacctacaaccatgacataccccttgaaagcaacatctacagtgaagcagtcctgggactggaccactgacatggatggctaccttggagagaccagtgctgggccaggaaagagcctgcctgtctttgccatcatcctcatcatctccttgtgctgtatggtggtttttaccatggcctatatcatgctctgtcggaagacatcccaacaagagcatgtctacgaagcagccagggcacatgccagagaggccaacgactctggagaaaccatgagggtggccatcttcgcaagtggctgctccagtgatgagccaacttcccagaatctgggcaacaactactctgatgagccctgcataggacaggagtaccagatcatcgcccagatcaatggcaactacgcccgcctgctggacacagttcctctggattatgagtttctggccactgagggcaaaagtgtctgttaaaaatgccccattaggccaggatctgctgacataattgcctagtcagtccttgccttctgcatggccttcttccctgctacctctcttcctggatagcccaaagtgtccgcctaccaacactggagccgctgggagtcactggctttgccctggaatttgccagatgcatctcaagtaagccagctgctggatttggctctgggcccttctagtatctctgccgggggcttctggtactcctctctaaataccagagggaagatgcccatagcactaggacttggtcatcatgcctacagacactattcaactttggcatcttgccaccagaagacccgagggaggctcagctctgccagctcagaggaccagctatatccaggatcatttctctttcttcagggccagacagcttttaattgaaattgttatttcacaggccagggttcagttctgctcctccactataagtctaatgttctgactctctcctggtgctcaataaatatctaatcataacagcaaaaaaaaaaaaaaaaaaa

SEQ ID NO: 8 - protein, 399 aa, Homo sapiens
MGILLGLLLLGHLTVDTYGRPILEVPESVTGPWKGDVNLPCTYDPLQGYTQVLVKWLVQRGSDPVTIFLRDSSGDHIQQAKYQGRLHVSHKVPGDVSLQLSTLEMDDRSHYTCEVTWQTPDGNQVVRDKITELRVQKLSVSKPTVTTGSGYGFTVPQGMRISLQCQARGSPPISYIWYKQQTNNQEPIKVATLSTLLFKPAVIADSGSYFCTAKGQVGSEQHSDIVKFVVKDSSKLLKTKTEAPTTMTYPLKATSTVKQSWDWTTDMDGYLGETSAGPGKSLPVFAIILIISLCCMVVFTMAYIMLCRKTSQQEHVYEAARAHAREANDSGETMRVAIFASGCSSDEPTSQNLGNNYSDEPCIGQEYQIIAQINGNYARLLDTVPLDYEFLATEGKSVC

SEQ ID NO: 9 - DNA, 1586 bp, Homo sapiens
ggagtttgagtgagagatatagggaaggaagggaagtaagcagtcacagacgctggcggccaccagaagtttgagcctctttggtagcaggaggctggaagaaaggacagaagtagctctggctgtgatggggatcttactgggcctgctactcctggggcacctaacagtggacacttatggccgtcccatcctggaagtgccagagagtgtaacaggaccttggaaaggggatgtgaatcttccctgcacctatgaccccctgcaaggctacacccaagtcttggtgaagtggctggtacaacgtggctcagaccctgtcaccatctttctacgtgactcttctggagaccatatccagcaggcaaagtaccagggccgcctgcatgtgagccacaaggttccaggagatgtatccctccaattgagcaccctggagatggatgaccggagccactacacgtgtgaagtcacctggcagactcctgatggcaaccaagtcgtgagagataagattactgagctccgtgtccagaaacactcctcaaagctactcaagaccaagactgaggcacctacaaccatgacataccccttgaaagcaacatctacagtgaagcagtcctgggactggaccactgacatggatggctaccttggagagaccagtgctgggccaggaaagagcctgcctgtctttgccatcatcctcatcatctccttgtgctgtatggtggtttttaccatggcctatatcatgctctgtcggaagacatcccaacaagagcatgtctacgaagcagccagggcacatgccagagaggccaacgactctggagaaaccatgagggtggccatcttcgcaagtggctgctccagtgatgagccaacttcccagaatctgggcaacaactactctgatgagccctgcataggacaggagtaccagatcatcgcccagatcaatggcaactacgcccgcctgctggacacagttcctctggattatgagtttctggccactgagggcaaaagtgtctgttaaaaatgccccattaggccaggatctgctgacataattgcctagtcagtccttgccttctgcatggccttcttccctgctacctctcttcctggatagcccaaagtgtccgcctaccaacactggagccgctgggagtcactggctttgccctggaatttgccagatgcatctcaagtaagccagctgctggatttggctctgggcccttctagtatctctgccgggggcttctggtactcctctctaaataccagagggaagatgcccatagcactaggacttggtcatcatgcctacagacactattcaactttggcatcttgccaccagaagacccgagggaggctcagctctgccagctcagaggaccagctatatccaggatcatttctctttcttcagggccagacagcttttaattgaaattgttatttcacaggccagggttcagttctgctcctccactataagtctaatgttctgactctctcctggtgctcaataaatatctaatcataacagcaaaaaaaaaaaaaaaaaa

SEQ ID NO: 10 - protein, 305 aa, Homo sapiens
MGILLGLLLLGHLTVDTYGRPILEVPESVTGPWKGDVNLPCTYDPLQGYTQVLVKWLVQRGSDPVTIFLRDSSGDHIQQAKYQGRLHVSHKVPGDVSLQLSTLEMDDRSHYTCEVTWQTPDGNQVVRDKITELRVQKHSSKLLKTKTEAPTTMTYPLKATSTVKQSWDWTTDMDGYLGETSAGPGKSLPVFAIILIISLCCMVVFTMAYIMLCRKTSQQEHVYEAARAHAREANDSGETMRVAIFASGCSSDEPTSQNLGNNYSDEPCIGQEYQIIAQINGNYARLLDTVPLDYEFLATEGKSVC

SEQ ID NO: 11 - DNA, 1927 bp, Homo sapiens
ggagtttgagtgagagatatagggaaggaagggaagtaagcagtcacagacgctggcggccaccagaagtttgagcctctttggtagcaggaggctggaagaaaggacagaagtagctctggctgtgatggggatcttactgggcctgctactcctggggcacctaacagtggacacttatggccgtcccatcctggaagtgccagagagtgtaacaggaccttggaaaggggatgtgaatcttccctgcacctatgaccccctgcaaggctacacccaagtcttggtgaagtggctggtacaacgtggctcagaccctgtcaccatctttctacgtgactcttctggagaccatatccagcaggcaaagtaccagggccgcctgcatgtgagccacaaggttccaggagatgtatccctccaattgagcaccctggagatggatgaccggagccactacacgtgtgaagtcacctggcagactcctgatggcaaccaagtcgtgagagataagattactgagctccgtgtccagaaacactcctcaaagctactcaagaccaagactgaggcacctacaaccatgacataccccttgaaagcaacatctacagtgaagcagtcctgggactggaccactgacatggatggctaccttggagagaccagtgctgggccaggaaagagcctgcctgtctttgccatcatcctcatcatctccttgtgctgtatggtggtttttaccatggcctatatcatgctctgtcggaagacatcccaacaagagcatgtctacgaagcagccaggtaagaaagtctctcctcttccatttttgaccccgtccctgccctcaattttgattactggcaggaaatgtggaggaaggggggtgtggcacagacccaatcctaaggccggaggccttcagggtcaggacatagctgccttccctctctcaggcaccttctgaggttgttttggccctctgaacacaaaggataatttagatccatctgccttctgcttccagaatccctgggtggtaggatcctgataattaattggcaagaattgaggcagaagggtgggaaaccaggaccacagccccaagtcccttcttatgggtggtgggctcttgggccatagggcacatgccagagaggccaacgactctggagaaaccatgagggtggccatcttcgcaagtggctgctccagtgatgagccaacttcccagaatctgggcaacaactactctgatgagccctgcataggacaggagtaccagatcatcgcccagatcaatggcaactacgcccgcctgctggacacagttcctctggattatgagtttctggccactgagggcaaaagtgtctgttaaaaatgccccattaggccaggatctgctgacataattgcctagtcagtccttgccttctgcatggccttcttccctgctacctctcttcctggatagcccaaagtgtccgcctaccaacactggagccgctgggagtcactggctttgccctggaatttgccagatgcatctcaagtaagccagctgctggatttggctctgggcccttctagtatctctgccgggggcttctggtactcctctctaaataccagagggaagatgcccatagcactaggacttggtcatcatgcctacagacactattcaactttggcatcttgccaccagaagacccgagggaggctcagctctgccagctcagaggaccagctatatccaggatcatttctctttcttcagggccagacagcttttaattgaaattgttatttcacaggccagggttcagttctgctcctccactataagtctaatgttctgactctctcctggtgctcaataaatatctaatcataacagcaaaaaaaaaaaaaaaaaaa

SEQ ID NO: 12 - protein, 227 aa, Homo sapiens
MGILLGLLLLGHLTVDTYGRPILEVPESVTGPWKGDVNLPCTYDPLQGYTQVLVKWLVQRGSDPVTIFLRDSSGDHIQQAKYQGRLHVSHKVPGDVSLQLSTLEMDDRSHYTCEVTWQTPDGNQVVRDKITELRVQKHSSKLLKTKTEAPTTMTYPLKATSTVKQSWDWTTDMDGYLGETSAGPGKSLPVFAIILIISLCCMVVFTMAYIMLCRKTSQQEHVYEAAR

SEQ ID NO: 13 - DNA, 2209 bp, Homo sapiens
ggagtttgagtgagagatatagggaaggaagggaagtaagcagtcacagacgctggcggccaccagaagtttgagcctctttggtagcaggaggctggaagaaaggacagaagtagctctggctgtgatggggatcttactgggcctgctactcctggggcacctaacagtggacacttatggccgtcccatcctggaagtgccagagagtgtaacaggaccttggaaaggggatgtgaatcttccctgcacctatgaccccctgcaaggctacacccaagtcttggtgaagtggctggtacaacgtggctcagaccctgtcaccatctttctacgtgactcttctggagaccatatccagcaggcaaagtaccagggccgcctgcatgtgagccacaaggttccaggagatgtatccctccaattgagcaccctggagatggatgaccggagccactacacgtgtgaagtcacctggcagactcctgatggcaaccaagtcgtgagagataagattactgagctccgtgtccagaaactctctgtctccaagcccacagtgacaactggcagcggttatggcttcacggtgccccagggaatgaggattagccttcaatgccaggctcggggttctcctcccatcagttatatttggtataagcaacagactaataaccaggaacccatcaaagtagcaaccctaagtaccttactcttcaagcctgcggtgatagccgactcaggctcctatttctgcactgccaagggccaggttggctctgagcagcacagcgacattgtgaagtttgtggtcaaagactcctcaaagctactcaagaccaagactgaggcacctacaaccatgacataccccttgaaagcaacatctacagtgaagcagtcctgggactggaccactgacatggatggctaccttggagagaccagtgctgggccaggaaagagcctgcctgtctttgccatcatcctcatcatctccttgtgctgtatggtggtttttaccatggcctatatcatgctctgtcggaagacatcccaacaagagcatgtctacgaagcagccaggtaagaaagtctctcctcttccatttttgaccccgtccctgccctcaattttgattactggcaggaaatgtggaggaaggggggtgtggcacagacccaatcctaaggccggaggccttcagggtcaggacatagctgccttccctctctcaggcaccttctgaggttgttttggccctctgaacacaaaggataatttagatccatctgccttctgcttccagaatccctgggtggtaggatcctgataattaattggcaagaattgaggcagaagggtgggaaaccaggaccacagccccaagtcccttcttatgggtggtgggctcttgggccatagggcacatgccagagaggccaacgactctggagaaaccatgagggtggccatcttcgcaagtggctgctccagtgatgagccaacttcccagaatctgggcaacaactactctgatgagccctgcataggacaggagtaccagatcatcgcccagatcaatggcaactacgcccgcctgctggacacagttcctctggattatgagtttctggccactgagggcaaaagtgtctgttaaaaatgccccattaggccaggatctgctgacataattgcctagtcagtccttgccttctgcatggccttcttccctgctacctctcttcctggatagcccaaagtgtccgcctaccaacactggagccgctgggagtcactggctttgccctggaatttgccagatgcatctcaagtaagccagctgctggatttggctctgggcccttctagtatctctgccgggggcttctggtactcctctctaaataccagagggaagatgcccatagcactaggacttggtcatcatgcctacagacactattcaactttggcatcttgccaccagaagacccgagggaggctcagctctgccagctcagaggaccagctatatccaggatcatttctctttcttcagggccagacagcttttaattgaaattgttatttcacaggccagggttcagttctgctcctccactataagtctaatgttctgactctctcctggtgctcaataaatatctaatcataacagcaaaaaaaaaaaaaaaaaaa

SEQ ID NO: 14 - protein, 321 aa, Homo sapiens
MGILLGLLLLGHLTVDTYGRPILEVPESVTGPWKGDVNLPCTYDPLQGYTQVLVKWLVQRGSDPVTIFLRDSSGDHIQQAKYQGRLHVSHKVPGDVSLQLSTLEMDDRSHYTCEVTWQTPDGNQVVRDKITELRVQKLSVSKPTVTTGSGYGFTVPQGMRISLQCQARGSPPISYIWYKQQTNNQEPIKVATLSTLLFKPAVIADSGSYFCTAKGQVGSEQHSDIVKFVVKDSSKLLKTKTEAPTTMTYPLKATSTVKQSWDWTTDMDGYLGETSAGPGKSLPVFAIILIISLCCMVVFTMAYIMLCRKTSQQEHVYEAAR

SEQ ID NO: 15 - DNA, 1535 bp, Homo sapiens
ggagtttgagtgagagatatagggaaggaagggaagtaagcagtcacagacgctggcggccaccagaagtttgagcctctttggtagcaggaggctggaagaaaggacagaagtagctctggctgtgatggggatcttactgggcctgctactcctggggcacctaacagtggacacttatggccgtcccatcctggaagtgccagagagtgtaacaggaccttggaaaggggatgtgaatcttccctgcacctatgaccccctgcaaggctacacccaagtcttggtgaagtggctggtacaacgtggctcagaccctgtcaccatctttctacgtgactcttctggagaccatatccagcaggcaaagtaccagggccgcctgcatgtgagccacaaggttccaggagatgtatccctccaattgagcaccctggagatggatgaccggagccactacacgtgtgaagtcacctggcagactcctgatggcaaccaagtcgtgagagataagattactgagctccgtgtccagaaactctctgtctccaagcccacagtgacaactggcagcggttatggcttcacggtgccccagggaatgaggattagccttcaatgccaggctcggggttctcctcccatcagttatatttggtataagcaacagactaataaccaggaacccatcaaagtagcaaccctaagtaccttactcttcaagcctgcggtgatagccgactcaggctcctatttctgcactgccaagggccaggttggctctgagcagcacagcgacattgtgaagtttgtggtcaaagactcctcaaagctactcaagaccaagactgaggcacctacaaccatgacataccccttgaaagcaacatctacagtgaagcagtcctgggactggaccactgacatggatggctaccttggagagaccagtgctgggccaggaaagagcctgcctgtctttgccatcatcctcatcatctccttgtgctgtatggtggtttttaccatggcctatatcatgctctgtcggaagacatcccaacaagagcatgtctacgaagcagccagcccaaagtgtccgcctaccaacactggagccgctgggagtcactggctttgccctggaatttgccagatgcatctcaagtaagccagctgctggatttggctctgggcccttctagtatctctgccgggggcttctggtactcctctctaaataccagagggaagatgcccatagcactaggacttggtcatcatgcctacagacactattcaactttggcatcttgccaccagaagacccgagggaggctcagctctgccagctcagaggaccagctatatccaggatcatttctctttcttcagggccagacagcttttaattgaaattgttatttcacaggccagggttcagttctgctcctccactataagtctaatgttctgactctctcctggtgctcaataaatatctaatcataacagcaaaaaaaaaaaaaaaaaaa

SEQ ID NO: 16 - protein, 347 aa, Homo sapiens
MGILLGLLLLGHLTVDTYGRPILEVPESVTGPWKGDVNLPCTYDPLQGYTQVLVKWLVQRGSDPVTIFLRDSSGDHIQQAKYQGRLHVSHKVPGDVSLQLSTLEMDDRSHYTCEVTWQTPDGNQVVRDKITELRVQKLSVSKPTVTTGSGYGFTVPQGMRISLQCQARGSPPISYIWYKQQTNNQEPIKVATLSTLLFKPAVIADSGSYFCTAKGQVGSEQHSDIVKFVVKDSSKLLKTKTEAPTTMTYPLKATSTVKQSWDWTTDMDGYLGETSAGPGKSLPVFAIILIISLCCMVVFTMAYIMLCRKTSQQEHVYEAASPKCPPTNTGAAGSHWLCPGICQMHLK

SEQ ID NO: 17 - DNA, 1432 bp, Mus musculus
agctaccagcacttccaggttcttcagcagcaagaggatggaaggatgaatagaagtagcttcaaataggatggagatctcatcaggcttgctgttcctgggccacctaatagtgctcacctatggccaccccaccctaaaaacacctgagagtgtgacagggacctggaaaggagatgtgaagattcagtgcatctatgatcccctgagaggctacaggcaagttttggtgaaatggctggtaagacacggctctgactccgtcaccatcttcctacgtgactccactggagaccatatccagcaggcaaagtacagaggccgcctgaaagtgagccacaaagttccaggagatgtgtccctccaaataaataccctgcagatggatgacaggaatcactatacatgtgaggtcacctggcagactcctgatggaaaccaagtaataagagataagatcattgagctccgtgttcggaaatataatccacctagaatcaatactgaagcacctacaaccctgcactcctctttggaagcaacaactataatgagttcaacctctgacttgaccactaatgggactggaaaacttgaggagaccattgctggttcagggaggaacctgccaatctttgccataatcttcatcatctccctttgctgcatagtagctgtcaccataccttatatcttgttccgctgcaggacattccaacaagagtatgtctatggagtgagcagggtgtttgccaggaagacaagcaactctgaagaaaccacaagggtgactaccatcgcaactgatgaaccagattcccaggctctgattagtgactactctgatgatccttgcctcagccaggagtaccaaataaccatcagatcaacaatgtctattcctgcctgctgaacacagtttccagaaactaagaagttcttgctactgaagaaaataacatctgctaaaatgcccctactaagtcaaggtctactggcgtaattacctgttacttatttactacttgccttcaacatagctttctccctggcttcctttcttcttagacaacctaaagtatctatctagtctgccaattctggggccattgagaaatcctgggtttggctaagaatatactacatgcacctcaagaaatctagcttctgggcttcacccagaacaattttcttcctagggccttcacaactcttctccaaacagcagagaaattccatagcagtagaggttctttatcatgcctccagacagcgtgagtctcagtcctacaaactcagacaagcacatgggtctaggattactcctctttctctagggccagatgacttttaattgatattactattgctacattatgaatctaatgcacatgtattcttttgttgttaataaatgtttaatcatgacatc

SEQ ID NO: 18 - protein, 280 aa, Mus musculus
MEISSGLLFLGHLIVLTYGHPTLKTPESVTGTWKGDVKIQCIYDPLRGYRQVLVKWLVRHGSDSVTIFLRDSTGDHIQQAKYRGRLKVSHKVPGDVSLQINTLQMDDRNHYTCEVTWQTPDGNQVIRDKIIELRVRKYNPPRINTEAPTTLHSSLEATTIMSSTSDLTTNGTGKLEETIAGSGRNLPIFAIIFIISLCCIVAVTIPYILFRCRTFQQEYVYGVSRVFARKTSNSEETTRVTTIATDEPDSQALISDYSDDPCLSQEYQITIRSTMSIPAC

SEQ ID NO: 19 - DNA, 1698 bp, Homo sapiens
ctgcctggggagcccccccgccccacatcctgccccgcaaaaggcagcttcaccaaagtggggtatttccagcctttgtagctttcacttccacatctaccaagtgggcggagtggccttctgtggacgaatcagattcctctccagcaccgactttaagaggcgagccggggggtcagggtcccagatgcacaggaggagaagcaggagctgtcgggaagatcagaagccagtcatggatgaccagcgcgaccttatctccaacaatgagcaactgcccatgctgggccggcgccctggggccccggagagcaagtgcagccgcggagccctgtacacaggcttttccatcctggtgactctgctcctcgctggccaggccaccaccgcctacttcctgtaccagcagcagggccggctggacaaactgacagtcacctcccagaacctgcagctggagaacctgcgcatgaagcttcccaagcctcccaagcctgtgagcaagatgcgcatggccaccccgctgctgatgcaggcgctgcccatgggagccctgccccaggggcccatgcagaatgccaccaagtatggcaacatgacagaggaccatgtgatgcacctgctccagaatgctgaccccctgaaggtgtacccgccactgaaggggagcttcccggagaacctgagacaccttaagaacaccatggagaccatagactggaaggtctttgagagctggatgcaccattggctcctgtttgaaatgagcaggcactccttggagcaaaagcccactgacgctccaccgaaagtactgaccaagtgccaggaagaggtcagccacatccctgctgtccacccgggttcattcaggcccaagtgcgacgagaacggcaactatctgccactccagtgctatgggagcatcggctactgctggtgtgtcttccccaacggcacggaggtccccaacaccagaagccgcgggcaccataactgcagtgagtcactggaactggaggacccgtcttctgggctgggtgtgaccaagcaggatctgggcccagtccccatgtgagagcagcagaggcggtcttcaacatcctgccagccccacacagctacagctttcttgctcccttcagcccccagcccctcccccatctcccaccctgtacctcatcccatgagaccctggtgcctggctctttcgtcacccttggacaagacaaaccaagtcggaacagcagataacaatgcagcaaggccctgctgcccaatctccatctgtcaacaggggcgtgaggtcccaggaagtggccaaaagctagacagatccccgttcctgacatcacagcagcctccaacacaaggctccaagacctaggctcatggacgagatgggaaggcacagggagaagggataaccctacacccagaccccaggctggacatgctgactgtcctctcccctccagcctttggccttggcttttctagcctatttacctgcaggctgagccactctcttccctttccccagcatcactccccaaggaagagccaatgttttccacccataatcctttctgccgacccctagttccctctgctcagccaagcttgttatcagctttcagggccatggttcacattagaataaaaggtagtaattagaacaaaaaaaaaaaaaaaaaa

SEQ ID NO: 20 - protein, 296 aa, Homo sapiens
MHRRRSRSCREDQKPVMDDQRDLISNNEQLPMLGRRPGAPESKCSRGALYTGFSILVTLLLAGQATTAYFLYQQQGRLDKLTVTSQNLQLENLRMKLPKPPKPVSKMRMATPLLMQALPMGALPQGPMQNATKYGNMTEDHVMHLLQNADPLKVYPPLKGSFPENLRHLKNTMETIDWKVFESWMHHWLLFEMSRHSLEQKPTDAPPKVLTKCQEEVSHIPAVHPGSFRPKCDENGNYLPLQCYGSIGYCWCVFPNGTEVPNTRSRGHHNCSESLELEDPSSGLGVTKQDLGPVPM

SEQ ID NO: 21 - DNA, 1506 bp, Homo sapiens
ctgcctggggagcccccccgccccacatcctgccccgcaaaaggcagcttcaccaaagtggggtatttccagcctttgtagctttcacttccacatctaccaagtgggcggagtggccttctgtggacgaatcagattcctctccagcaccgactttaagaggcgagccggggggtcagggtcccagatgcacaggaggagaagcaggagctgtcgggaagatcagaagccagtcatggatgaccagcgcgaccttatctccaacaatgagcaactgcccatgctgggccggcgccctggggccccggagagcaagtgcagccgcggagccctgtacacaggcttttccatcctggtgactctgctcctcgctggccaggccaccaccgcctacttcctgtaccagcagcagggccggctggacaaactgacagtcacctcccagaacctgcagctggagaacctgcgcatgaagcttcccaagcctcccaagcctgtgagcaagatgcgcatggccaccccgctgctgatgcaggcgctgcccatgggagccctgccccaggggcccatgcagaatgccaccaagtatggcaacatgacagaggaccatgtgatgcacctgctccagaatgctgaccccctgaaggtgtacccgccactgaaggggagcttcccggagaacctgagacaccttaagaacaccatggagaccatagactggaaggtctttgagagctggatgcaccattggctcctgtttgaaatgagcaggcactccttggagcaaaagcccactgacgctccaccgaaagagtcactggaactggaggacccgtcttctgggctgggtgtgaccaagcaggatctgggcccagtccccatgtgagagcagcagaggcggtcttcaacatcctgccagccccacacagctacagctttcttgctcccttcagcccccagcccctcccccatctcccaccctgtacctcatcccatgagaccctggtgcctggctctttcgtcacccttggacaagacaaaccaagtcggaacagcagataacaatgcagcaaggccctgctgcccaatctccatctgtcaacaggggcgtgaggtcccaggaagtggccaaaagctagacagatccccgttcctgacatcacagcagcctccaacacaaggctccaagacctaggctcatggacgagatgggaaggcacagggagaagggataaccctacacccagaccccaggctggacatgctgactgtcctctcccctccagcctttggccttggcttttctagcctatttacctgcaggctgagccactctcttccctttccccagcatcactccccaaggaagagccaatgttttccacccataatcctttctgccgacccctagttccctctgctcagccaagcttgttatcagctttcagggccatggttcacattagaataaaaggtagtaattagaacaaaaaaaaaaaaaaaaaa

SEQ ID NO: 22 - protein, 232 aa, Homo sapiens
MHRRRSRSCREDQKPVMDDQRDLISNNEQLPMLGRRPGAPESKCSRGALYTGFSILVTLLLAGQATTAYFLYQQQGRLDKLTVTSQNLQLENLRMKLPKPPKPVSKMRMATPLLMQALPMGALPQGPMQNATKYGNMTEDHVMHLLQNADPLKVYPPLKGSFPENLRHLKNTMETIDWKVFESWMHHWLLFEMSRHSLEQKPTDAPPKESLELEDPSSGLGVTKQDLGPVPM

SEQ ID NO: 23 - DNA, 1322 bp, Homo sapiens
ctgcctggggagcccccccgccccacatcctgccccgcaaaaggcagcttcaccaaagtggggtatttccagcctttgtagctttcacttccacatctaccaagtgggcggagtggccttctgtggacgaatcagattcctctccagcaccgactttaagaggcgagccggggggtcagggtcccagatgcacaggaggagaagcaggagctgtcgggaagatcagaagccagtcatggatgaccagcgcgaccttatctccaacaatgagcaactgcccatgctgggccggcgccctggggccccggagagcaagtgcagccgcggagccctgtacacaggcttttccatcctggtgactctgctcctcgctggccaggccaccaccgcctacttcctgtaccagcagcagggccggctggacaaactgacagtcacctcccagaacctgcagctggagaacctgcgcatgaagcttcccaagcctcccaagcctgtgagcaagatgcgcatggccaccccgctgctgatgcaggcgctgcccatgggagccctgccccaggggcccatgcagaatgccaccaagtatggcaacatgacagaggaccatgtgatgcacctgctccagagtcactggaactggaggacccgtcttctgggctgggtgtgaccaagcaggatctgggcccagtccccatgtgagagcagcagaggcggtcttcaacatcctgccagccccacacagctacagctttcttgctcccttcagcccccagcccctcccccatctcccaccctgtacctcatcccatgagaccctggtgcctggctctttcgtcacccttggacaagacaaaccaagtcggaacagcagataacaatgcagcaaggccctgctgcccaatctccatctgtcaacaggggcgtgaggtcccaggaagtggccaaaagctagacagatccccgttcctgacatcacagcagcctccaacacaaggctccaagacctaggctcatggacgagatgggaaggcacagggagaagggataaccctacacccagaccccaggctggacatgctgactgtcctctcccctccagcctttggccttggcttttctagcctatttacctgcaggctgagccactctcttccctttccccagcatcactccccaaggaagagccaatgttttccacccataatcctttctgccgacccctagttccctctgctcagccaagcttgttatcagctttcagggccatggttcacattagaataaaaggtagtaattagaacaaaaaaaaaaaaaaaaaa

SEQ ID NO: 24 - protein, 160 aa, Homo sapiens
MHRRRSRSCREDQKPVMDDQRDLISNNEQLPMLGRRPGAPESKCSRGALYTGFSILVTLLLAGQATTAYFLYQQQGRLDKLTVTSQNLQLENLRMKLPKPPKPVSKMRMATPLLMQALPMGALPQGPMQNATKYGNMTEDHVMHLLQSHWNWRTRLLGWV

SEQ ID NO: 25 - DNA, 1431 bp, Mus musculus
agacacacagcagcagcagcagcagcagcagcagcaacagcagcagcagcagcagcgcctgtgggaaaaactagaggctagagccatggatgaccaacgcgacctcatctctaaccatgaacagttgcccatactgggcaaccgccctagagagccagaaaggtgcagccgtggagctctgtacaccggtgtctctgtcctggtggctctgctcttggctgggcaggccaccactgcttacttcctgtaccagcaacagggccgcctagacaagctgaccatcacctcccagaacctgcaactggagagccttcgcatgaagcttccgaaatctgccaaacctgtgagccagatgcggatggctactcccttgctgatgcgtccaatgtccatggataacatgctccttgggcctgtgaagaacgttaccaagtacggcaacatgacccaggaccatgtgatgcatctgctcacgaggtctggacccctggagtacccgcagctgaaggggaccttcccagagaatctgaagcatcttaagaactccatggatggcgtgaactggaagatcttcgagagctggatgaagcagtggctcttgtttgagatgagcaagaactccctggaggagaagaagcccaccgaggctccacctaaagtactgaccaagtgccaggaagaagtcagccacatccctgccgtctacccgggtgcgttccgtcccaagtgcgacgagaacggtaactatttgccactccagtgccacgggagcactggctactgctggtgtgtgttccccaacggcactgaggttcctcacaccaagagccgcgggcgccataactgcagtgagccactggacatggaagacctatcttctggcctgggagtgaccaggcaggaactgggtcaagtcaccctgtgaagacagaggccagctctgcacagcagcagcgccccctgctctcctgtgcctcagcccttcttatgttccctgatgtcacaccccacttcccgtctccctgcaccctggggcttgagactggtgtctgtttcatcgtcccaggacacggcaaatgaagtcagaacagaaggaggacgctggagggccttgctggctaccgctatctaaagggaacccccatttctgacccattagtagtcttgaatgtggggctctgagataaaggcccgcagacagggacaagggatgccctacccttaacctaggctggacacatttgctgccttctcctcaaggaagaagaacccaagcccctcctcccagtaacccctcctcacatcctgccaccccccctcaagccccaccccctttcaggttccttgctcagccaagcttgtcagcagcctgtaggatcatggttcaagtgacaataaaggaagaaagtagaacaaaaaaaaaaaaaaaaa

SEQ ID NO: 26 - protein, 279 aa, Mus musculus
MDDQRDLISNHEQLPILGNRPREPERCSRGALYTGVSVLVALLLAGQATTAYFLYQQQGRLDKLTITSQNLQLESLRMKLPKSAKPVSQMRMATPLLMRPMSMDNMLLGPVKNVTKYGNMTQDHVMHLLTRSGPLEYPQLKGTFPENLKHLKNSMDGVNWKIFESWMKQWLLFEMSKNSLEEKKPTEAPPKVLTKCQEEVSHIPAVYPGAFRPKCDENGNYLPLQCHGSTGYCWCVFPNGTEVPHTKSRGRHNCSEPLDMEDLSSGLGVTRQELGQVTL

SEQ ID NO: 27 - DNA, 1239 bp, Mus musculus
agacacacagcagcagcagcagcagcagcagcagcaacagcagcagcagcagcagcgcctgtgggaaaaactagaggctagagccatggatgaccaacgcgacctcatctctaaccatgaacagttgcccatactgggcaaccgccctagagagccagaaaggtgcagccgtggagctctgtacaccggtgtctctgtcctggtggctctgctcttggctgggcaggccaccactgcttacttcctgtaccagcaacagggccgcctagacaagctgaccatcacctcccagaacctgcaactggagagccttcgcatgaagcttccgaaatctgccaaacctgtgagccagatgcggatggctactcccttgctgatgcgtccaatgtccatggataacatgctccttgggcctgtgaagaacgttaccaagtacggcaacatgacccaggaccatgtgatgcatctgctcacgaggtctggacccctggagtacccgcagctgaaggggaccttcccagagaatctgaagcatcttaagaactccatggatggcgtgaactggaagatcttcgagagctggatgaagcagtggctcttgtttgagatgagcaagaactccctggaggagaagaagcccaccgaggctccacctaaagagccactggacatggaagacctatcttctggcctgggagtgaccaggcaggaactgggtcaagtcaccctgtgaagacagaggccagctctgcacagcagcagcgccccctgctctcctgtgcctcagcccttcttatgttccctgatgtcacaccccacttcccgtctccctgcaccctggggcttgagactggtgtctgtttcatcgtcccaggacacggcaaatgaagtcagaacagaaggaggacgctggagggccttgctggctaccgctatctaaagggaacccccatttctgacccattagtagtcttgaatgtggggctctgagataaaggcccgcagacagggacaagggatgccctacccttaacctaggctggacacatttgctgccttctcctcaaggaagaagaacccaagcccctcctcccagtaacccctcctcacatcctgccaccccccctcaagccccaccccctttcaggttccttgctcagccaagcttgtcagcagcctgtaggatcatggttcaagtgacaataaaggaagaaagtagaacaaaaaaaaaaaaaaaaa

SEQ ID NO: 28 - protein, 215 aa, Mus musculus
MDDQRDLISNHEQLPILGNRPREPERCSRGALYTGVSVLVALLLAGQATTAYFLYQQQGRLDKLTITSQNLQLESLRMKLPKSAKPVSQMRMATPLLMRPMSMDNMLLGPVKNVTKYGNMTQDHVMHLLTRSGPLEYPQLKGTFPENLKHLKNSMDGVNWKIFESWMKQWLLFEMSKNSLEEKKPTEAPPKEPLDMEDLSSGLGVTRQELGQVTL

SEQ ID NO: 29 - DNA, 1886 bp, Homo sapiens
ggcagccagaagcacctgtgctcccaggataagggtgagcactcaggatgactgtggagaaggaggcccctgatgcgcacttcactgtggacaaacagaacatctccctctggccccgagagcctcctcccaagtccggtccatctctggtcccggggaaaacacccacagtccgtgctgcattaatctgcctgacgctggtcctggtcgcctccgtcctgctgcaggccgtcctttatccccggtttatgggcaccatatcagatgtaaagaccaatgtccagttgctgaaaggtcgtgtggacaacatcagcaccctggattctgaaattaaaaagaatagtgacggcatggaggcagctggcgttcagatccagatggtgaatgagagcctgggttatgtgcgttctcagttcctgaagttaaaaaccagtgtggagaaggccaacgcacagatccagatcttaacaagaagttgggaagaagtcagtaccttaaatgcccaaatcccagagttaaaaagtgatttggagaaagccagtgctttaaatacaaagatccgggcactccagggcagcttggagaatatgagcaagttgctcaaacgacaaaatgatattctacaggtggtttctcaaggctggaagtacttcaaggggaacttctattacttttctctcattccaaagacctggtatagtgccgagcagttctgtgtgtccaggaattcacacctgacctcggtgacctcagagagtgagcaggagtttctgtataaaacagcggggggactcatctactggattggcctgactaaagcagggatggaaggggactggtcctgggtggatgacacgccattcaacaaggtccaaagtgtgaggttctggattccaggtgagcccaacaatgctgggaacaatgaacactgtggcaatataaaggctccctcacttcaggcctggaatgatgccccatgtgacaaaacgtttcttttcatttgtaagcgaccctatgtcccatcagaaccgtgacaggacaggctcccaagctcactctttgagctccaacgcttgttaaacatgaggaaatgcctctttcttccccagactccaggatgactttgcacgttaatttttcttgcttcaaaattgtcccacagtggcattctggagtccgtctgtcttggctggaaattctctgacgtcttggaggcagctggaatggaaaggagaattcaggttaaagtgggaggggtgggtagagaggatttagaagttccaattgccctgctaaggaggatcaagacccgtaatccggcataacaccctggggttttccactctttcagagaaacctcagcttcatcacatcaaagttactccagagcaaccaagcaattctcctgatattgtcatccagggcttttcttggccaaaccccctagaatttccatgtctctgcttagctgtgctggcagctagcagctggctgtgtttgcagtgcaaatagctctgttcttggaaatcctgctcatggtatgtccccagtggtttcttcatccacatcatctaaagcctgaacccgttcttctctggttcaagtcagtggctgacacggacttgtatctccttcagagctcggctggcacccagcctcccttctccttccactcccttagtacactggagtgccgagccctgccttccacccagcgtccatccagcccctgtcctcacctctccggcacctcctcctccttctgcatttcctatcttcctgtgtcttgtgcatgggaagcagccttcagtgccttcatgaattcaccttccagcttcctcagaataaaatgctgcctgggtcaaggactcaaaaaaaaaaaaaaa

SEQ ID NO: 30 - protein, 328 aa, Homo sapiens
MTVEKEAPDAHFTVDKQNISLWPREPPPKSGPSLVPGKTPTVRAALICLTLVLVASVLLQAVLYPRFMGTISDVKTNVQLLKGRVDNISTLDSEIKKNSDGMEAAGVQIQMVNESLGYVRSQFLKLKTSVEKANAQIQILTRSWEEVSTLNAQIPELKSDLEKASALNTKIRALQGSLENMSKLLKRQNDILQVVSQGWKYFKGNFYYFSLIPKTWYSAEQFCVSRNSHLTSVTSESEQEFLYKTAGGLIYWIGLTKAGMEGDWSWVDDTPFNKVQSVRFWIPGEPNNAGNNEHCGNIKAPSLQAWNDAPCDKTFLFICKRPYVPSEP

SEQ ID NO: 31 - DNA, 1530 bp, Mus musculus
tttcccgtttctttctggataaaaaggtccttggggagacagatattgagaatttcctatgccagaggcagagatgaaggaggaggctcccgaagcgcacttcacagtggacaaacagaacatctctctctggcctcgagagcctcctcccaagcaagatctgtctccagttctaaggaaacctctctgtatctgcgtggccttcacctgcctggcattggtgctggtcacctccattgtgcttcaggctgttttctatcctaggttgatgggcaaaatattggatgtgaagagtgatgcccagatgttgaaaggtcgtgtggacaacatcagcaccctgggttctgatcttaagactgaaagaggtcgtgtggacgatgctgaggttcagatgcagatagtgaacaccaccctcaagagggtgcgttctcagatcctgtctttggaaaccagcatgaagatagccaatgatcagctccagatattaacaatgagctggggagaggttgacagtctcagtgccaaaatcccagaactgaaaagagatctggataaagccagcgccttgaacacaaaggtccaaggactacagaacagcttggagaatgtcaacaagctgctcaaacaacagagtgacattctggagatggtggctcgaggctggaagtatttctcggggaacttctattacttttcacgcaccccaaagacctggtacagcgcagagcagttctgtatttctagaaaagctcacctgacctcagtgtcctcagaatcggaacaaaagtttctctacaaggcagcagatggaattccacactggattggacttaccaaagcagggagcgaaggggactggtactgggtggaccagacatcattcaacaaggagcaaagtaggaggttctggattccaggtgaacccaacaacgcagggaacaatgagcactgtgccaatatcagggtgtctgccctgaagtgctggaacgatggtccctgtgacaatacatttcttttcatctgcaagaggccctacgtccaaacaactgaatgacagatctggcctgagctcggcatctgtggggcaacagtgacctggctgaagagatgtctctctccctgaggctccaagattgctctgtactttacgtttttttcttgcttgaaaattgtcccaaacacagcctgtggtctttctgtcttggctggcagttctctgctcctggaggccttggaggagcttgggttaaacgggtgaggacctgaagagggcgtagcagtccttactgcccaggcgaggcaggtcagcacaccaaacaggttgtttagattttcctgatccttctcagaagccttggctgaccatataaaagctacattcaaatatgaccagtatttgaggaggcagacatgcccaaatttaaccatgatacaatttatacaacatgtattagaacacctcatggtatgctcaaaatatgtaaatatgttgtttttatgtgcctattgcaaataaatgtaatattacta

SEQ ID NO: 32 - protein, 331 aa, Mus musculus
MPEAEMKEEAPEAHFTVDKQNISLWPREPPPKQDLSPVLRKPLCICVAFTCLALVLVTSIVLQAVFYPRLMGKILDVKSDAQMLKGRVDNISTLGSDLKTERGRVDDAEVQMQIVNTTLKRVRSQILSLETSMKIANDQLQILTMSWGEVDSLSAKIPELKRDLDKASALNTKVQGLQNSLENVNKLLKQQSDILEMVARGWKYFSGNFYYFSRTPKTWYSAEQFCISRKAHLTSVSSESEQKFLYKAADGIPHWIGLTKAGSEGDWYWVDQTSFNKEQSRRFWIPGEPNNAGNNEHCANIRVSALKCWNDGPCDNTFLFICKRPYVQTTE

SEQ ID NO: 33 - DNA, 2430 bp, Homo sapiens
gccagaggaacgccagcgaccccagcagcgctgcggacggtgctggccgtggccgctgcggcccccgtgtccaggtgggccaggacgcagcctctgggcgccgtcgcttttccagcatcgcagaggcaaaagcgtggcagtgggacccaaaaggtaggactgaggctctagaacttgcacctgtgcagggactgcaaaccagacctgggaggaccctttcagcagcccccactccaccctatcccaggacttcccagcgacccgccgttctgggagataccgggagcgtgatcagggggcggggccgtttccaaggcaaccgcttatttgcatagggtcccgtcctggccaacgagggcgccccaaatgttcaggacatagaagaaggggttaactggcccggatctcctcctcgccttccaagcccgctaagcactggggttatctacccattccccagaaggggagactgaggcagcccaccagccaaaggaggcgaccagactggggctgcgttttaccatttcagaagcggcttgagctggtctgagctataataataaacactggcggtggaggcgagggcgaccacagggctgaggtcagggctaggattccggtgtctctacgtaggttgcttgaatggggggcaccctggcatggacgctgctgttgccgctgctgctgcgggagtcagacagcctagaaccgtcgtgcaccgtgtcctccgcggatgtggactggaacgcggagttcagtgccacgtgcctgaatttcagtggcctcagcctgagcctgcctcacaaccagtctctgcgggccagcaacgtgattctccttgacctgtctgggaacggcctgcgagagcttccagtgaccttctttgcccacctgcagaagcttgaggtcctgaacgtgctacgcaaccccttgtctcgtgtggatggggcgctggccgcccgctgtgaccttgacctgcaggccgactgcaactgtgccctggagtcctggcacgacatccgccgagacaactgctctggccagaagcctctgctctgctgggacacaaccagctcccagcacaacctctctgccttcctggaggtcagctgcgcccctggcctggcctctgcaactatcggggcagtggtggtcagcgggtgcctgcttcttggacttgccatcgctggccctgtgctggcctggagactctggcgatgccgagtggccagaagccgggagctgaacaaaccctgggctgctcaggatgggcccaagcccggtttaggcttgcagccacggtacggcagccggagcgcccccaagccccaagtggccgtgccatcctgcccctccactcccgactatgagaacatgtttgtgggccagccagcagccgagcaccagtgggatgaacaaggggctcacccttcagaggacaatgacttttacatcaactacaaggacatcgacctggcttcccagcctgtctactgtaacctgcagtcactgggccaggccccaatggatgaagaggagtacgtgatccccgggcactgagcctaagatgtcctaacctccacccagaaccccttcagtccctgctgggtgactcagggcgtcctaacgcctccatggcctcagtttccccatctgaagaatgggtacaggaaaggattgtccttgaggccccaggaagctctgccgccccctccctgtccctcatgccgctcctcagctccctcagctcctagagggggaagaggagagacccccaacaaggggacaggacggtcactgtgccaatcctgtcatcaccctcctgtggatgtacaggcagtgctcaataaatgcttcgaggctgatgaggctgctggctcagggtgcgtgggttcctcaaggtggggatttctgagttctaagaccaagtctccatctgagactcccaaattgctccccacctcccatccctgtttttttttgttgttgttgtttgtttgtttgtttttgaaactgagtgtcactctgtcacccaggctggagtgcaatgctgcggtctcagctcactgcaacctccgcctcctgggttcaagtgattctcctgcctcagcctcctgagtagctgggattacagcacccgccaccatgccgagctaatttttgtatttataatagagatggggtttcgccatgttggccaggctggtctcgaactcctgacctcaagcgatctgcccgcctcggcctcctgaagtgctgggattacaggcgtggccactgcgcccaggcacattcctcccttctgcccctctcagggccccttcccaggtccctgatctccaggcttggcctccagagcagcccacaccaaccccaaaataaaaaaatgtatatattcctttaaaaaaaaaaaaaaaaaaaaaaaaaaaa

SEQ ID NO: 34 - protein, 305 aa, Homo sapiens
MGGTLAWTLLLPLLLRESDSLEPSCTVSSADVDWNAEFSATCLNFSGLSLSLPHNQSLRASNVILLDLSGNGLRELPVTFFAHLQKLEVLNVLRNPLSRVDGALAARCDLDLQADCNCALESWHDIRRDNCSGQKPLLCWDTTSSQHNLSAFLEVSCAPGLASATIGAVVVSGCLLLGLAIAGPVLAWRLWRCRVARSRELNKPWAAQDGPKPGLGLQPRYGSRSAPKPQVAVPSCPSTPDYENMFVGQPAAEHQWDEQGAHPSEDNDFYINYKDIDLASQPVYCNLQSLGQAPMDEEEYVIPGH

SEQ ID NO: 35 - DNA, 1273 bp, Mus musculus
ctcctcctctcgtgagagcctgaggctggcagagggctctctgctgtcccctccactcctacacctactcgtcttcccgtcttcccgcaggcgtggattaacaggtggaaagcaccaggagctgtgaaccccaacccagaccctaggaccctgaggcttacgagacatcacgaaggccaggaggttgctgggatgggaagcatcagaactaggttgctgtggttatgtctcctgatgctgttggccctgcttcacaagtcaggaagtcaagatctcacctgcatggttcacccgagcagggtagactggactcagacatttaatggcacctgcctcaatttcagtggccttggcctgtccctgccaaggagccccttgcaggccagccatgctcaagtcctggacctgtctaagaatggcctgcaggtgctccctggggctttcttcgacaagctggaaaagctgcagaccctgattgtcacccacaaccagctggacagtgtggacaggtccctggccttgcgctgtgacctggagctcaaggcagactgcagctgtgggctggcctcctggtatgctctccgccagaactgctccgggcagcagcagctactgtgtctacacccagccaccgaagctccaaggaacctctccaccttccttcaggtcagctgtccccccagctggggcccggggaccattggagcccttgttgctgggactatctccctggctgtggctgtcagtggatctgtgctggcctggagacttcttcgccgccgccgcagagccagtgagcacagcctcagcaaagcccagatgtccccacacgatatccccaaaccagtgacagatttcctgccaaggtacagcagccggcgacctggccccaaggccccagactcaccacccagcaggttcacaatggattatgagaatgtctttattggccagccggccgaggactgctcatggtctgcagccagaaacagcccttctggggacagtgactgctacatgaactacaggagtgtcgaccaggactctcagcccgtctattgcaacctggagtccctggggcgatgaggagagtgtggtctcctggcgctgaaccagcctccgacagcccccaggatccagcacgctcaacatcacagggggtagaggacaccccacccccccacccccaaagcagaaggagggtcagaaacaaccctccggtcagtgtgcatgcatgtgatgctcaataaaagctctgggagcagctgactct

SEQ ID NO: 36 - protein, 297 aa, Mus musculus
MGSIRTRLLWLCLLMLLALLHKSGSQDLTCMVHPSRVDWTQTFNGTCLNFSGLGLSLPRSPLQASHAQVLDLSKNGLQVLPGAFFDKLEKLQTLIVTHNQLDSVDRSLALRCDLELKADCSCGLASWYALRQNCSGQQQLLCLHPATEAPRNLSTFLQVSCPPSWGPGTIGALVAGTISLAVAVSGSVLAWRLLRRRRRASEHSLSKAQMSPHDIPKPVTDFLPRYSSRRPGPKAPDSPPSRFTMDYENVFIGQPAEDCSWSAARNSPSGDSDCYMNYRSVDQDSQPVYCNLESLGR

SEQ ID NO: 37 - DNA, 2638 bp, Homo sapiens
aatcatccgagaaccttggagggtggacagtgccccttttacagatgagaaaactgaggcttgaaggggagaagcagctgcctctggcggcatggcttctggctgcaggatgcccatggagttcgtggtgaccctaggcctgtgtctcggcttcctttgctgaacttgaacaggaagatggcagtgggggccagtggtctagaaggagataagatggctggtgccatgcctctgcaactcctcctgttgctgatcctactgggccctggcaacagcttgcagctgtgggacacctgggcagatgaagccgagaaagccttgggtcccctgcttgcccgggaccggagacaggccaccgaatatgagtacctagattatgatttcctgccagaaacggagcctccagaaatgctgaggaacagcactgacaccactcctctgactgggcctggaacccctgagtctaccactgtggagcctgctgcaaggcgttctactggcctggatgcaggaggggcagtcacagagctgaccacggagctggccaacatggggaacctgtccacggattcagcagctatggagatacagaccactcaaccagcagccacggaggcacagaccactcaaccagtgcccacggaggcacagaccactccactggcagccacagaggcacagacaactcgactgacggccacggaggcacagaccactccactggcagccacagaggcacagaccactccaccagcagccacggaagcacagaccactcaacccacaggcctggaggcacagaccactgcaccagcagccatggaggcacagaccactgcaccagcagccatggaagcacagaccactccaccagcagccatggaggcacagaccactcaaaccacagccatggaggcacagaccactgcaccagaagccacggaggcacagaccactcaacccacagccacggaggcacagaccactccactggcagccatggaggccctgtccacagaacccagtgccacagaggccctgtccatggaacctactaccaaaagaggtctgttcatacccttttctgtgtcctctgttactcacaagggcattcccatggcagccagcaatttgtccgtcaactacccagtgggggccccagaccacatctctgtgaagcagtgcctgctggccatcctaatcttggcgctggtggccactatcttcttcgtgtgcactgtggtgctggcggtccgcctctcccgcaagggccacatgtaccccgtgcgtaattactcccccaccgagatggtctgcatctcatccctgttgcctgatgggggtgaggggccctctgccacagccaatgggggcctgtccaaggccaagagcccgggcctgacgccagagcccagggaggaccgtgagggggatgacctcaccctgcacagcttcctcccttagctcactctgccatctgttttggcaagaccccacctccacgggctctcctgggccacccctgagtgcccagaccccattccacagctctgggcttcctcggagacccctggggatggggatcttcagggaaggaactctggccacccaaacaggacaagagcagcctggggccaagcagacgggcaagtggagccacctctttcctccctccgcggatgaagcccagccacatttcagccgaggtccaaggcaggaggccatttacttgagacagattctctcctttttcctgtcccccatcttctctgggtccctctaacatctcccatggctctccccgcttctcctggtcactggagtctcctccccatgtacccaaggaagatggagctcccccatcccacacgcactgcactgccattgtcttttggttgccatggtcaccaaacaggaagtggacattctaagggaggagtactgaagagtgacggacttctgaggctgtttcctgctgctcctctgacttggggcagcttgggtcttcttgggcacctctctgggaaaacccagggtgaggttcagcctgtgagggctgggatgggtttcgtgggcccaagggcagacctttctttgggactgtgtggaccaaggagcttccatctagtgacaagtgacccccagctatcgcctcttgccttcccctgtggccactttccagggtggactctgtcttgttcactgcagtatcccaactgcaggtccagtgcaggcaataaatatgtgatggacaaacgatagcggaatccttcaaggtttcaaggctgtctccttcaggcagccttcccggaattctccatccctcagtgcaggatgggggctggtcctcagctgtctgccctcagcccctggccccccaggaagcctctttcatgggctgttaggttgacttcagttttgcctcttggacaacagggggtcttgtacatccttgggtgaccaggaaaagttcaggctatggggggccaaagggagggctgccccttccccaccagtgaccactttattccacttcctccattacccagttttggcccacagagtttggtcccccccaaacctcggaccaatatccctctaaacatcaatctatcctcctgttaaagaaaaaaaaaaa

SEQ ID NO: 38 - protein, 428 aa, Homo sapiens
MAVGASGLEGDKMAGAMPLQLLLLLILLGPGNSLQLWDTWADEAEKALGPLLARDRRQATEYEYLDYDFLPETEPPEMLRNSTDTTPLTGPGTPESTTVEPAARRSTGLDAGGAVTELTTELANMGNLSTDSAAMEIQTTQPAATEAQTTQPVPTEAQTTPLAATEAQTTRLTATEAQTTPLAATEAQTTPPAATEAQTTQPTGLEAQTTAPAAMEAQTTAPAAMEAQTTPPAAMEAQTTQTTAMEAQTTAPEATEAQTTQPTATEAQTTPLAAMEALSTEPSATEALSMEPTTKRGLFIPFSVSSVTHKGIPMAASNLSVNYPVGAPDHISVKQCLLAILILALVATIFFVCTVVLAVRLSRKGHMYPVRNYSPTEMVCISSLLPDGGEGPSATANGGLSKAKSPGLTPEPREDREGDDLTLHSFLP

SEQ ID NO: 39 - DNA, 2573 bp, Homo sapiens
acacacagccattgggggttgctcggatccgggactgccgcagggggtgccacagcagtgcctggcagcgtgggctgggaccttgtcactaaagcagagaagccacttcttctgggcccacgaggcagctgtcccatgctctgctgagcacggtggtgccatgcctctgcaactcctcctgttgctgatcctactgggccctggcaacagcttgcagctgtgggacacctgggcagatgaagccgagaaagccttgggtcccctgcttgcccgggaccggagacaggccaccgaatatgagtacctagattatgatttcctgccagaaacggagcctccagaaatgctgaggaacagcactgacaccactcctctgactgggcctggaacccctgagtctaccactgtggagcctgctgcaaggcgttctactggcctggatgcaggaggggcagtcacagagctgaccacggagctggccaacatggggaacctgtccacggattcagcagctatggagatacagaccactcaaccagcagccacggaggcacagaccactcaaccagtgcccacggaggcacagaccactccactggcagccacagaggcacagacaactcgactgacggccacggaggcacagaccactccactggcagccacagaggcacagaccactccaccagcagccacggaagcacagaccactcaacccacaggcctggaggcacagaccactgcaccagcagccatggaggcacagaccactgcaccagcagccatggaagcacagaccactccaccagcagccatggaggcacagaccactcaaaccacagccatggaggcacagaccactgcaccagaagccacggaggcacagaccactcaacccacagccacggaggcacagaccactccactggcagccatggaggccctgtccacagaacccagtgccacagaggccctgtccatggaacctactaccaaaagaggtctgttcatacccttttctgtgtcctctgttactcacaagggcattcccatggcagccagcaatttgtccgtcaactacccagtgggggccccagaccacatctctgtgaagcagtgcctgctggccatcctaatcttggcgctggtggccactatcttcttcgtgtgcactgtggtgctggcggtccgcctctcccgcaagggccacatgtaccccgtgcgtaattactcccccaccgagatggtctgcatctcatccctgttgcctgatgggggtgaggggccctctgccacagccaatgggggcctgtccaaggccaagagcccgggcctgacgccagagcccagggaggaccgtgagggggatgacctcaccctgcacagcttcctcccttagctcactctgccatctgttttggcaagaccccacctccacgggctctcctgggccacccctgagtgcccagaccccattccacagctctgggcttcctcggagacccctggggatggggatcttcagggaaggaactctggccacccaaacaggacaagagcagcctggggccaagcagacgggcaagtggagccacctctttcctccctccgcggatgaagcccagccacatttcagccgaggtccaaggcaggaggccatttacttgagacagattctctcctttttcctgtcccccatcttctctgggtccctctaacatctcccatggctctccccgcttctcctggtcactggagtctcctccccatgtacccaaggaagatggagctcccccatcccacacgcactgcactgccattgtcttttggttgccatggtcaccaaacaggaagtggacattctaagggaggagtactgaagagtgacggacttctgaggctgtttcctgctgctcctctgacttggggcagcttgggtcttcttgggcacctctctgggaaaacccagggtgaggttcagcctgtgagggctgggatgggtttcgtgggcccaagggcagacctttctttgggactgtgtggaccaaggagcttccatctagtgacaagtgacccccagctatcgcctcttgccttcccctgtggccactttccagggtggactctgtcttgttcactgcagtatcccaactgcaggtccagtgcaggcaataaatatgtgatggacaaacgatagcggaatccttcaaggtttcaaggctgtctccttcaggcagccttcccggaattctccatccctcagtgcaggatgggggctggtcctcagctgtctgccctcagcccctggccccccaggaagcctctttcatgggctgttaggttgacttcagttttgcctcttggacaacagggggtcttgtacatccttgggtgaccaggaaaagttcaggctatggggggccaaagggagggctgccccttccccaccagtgaccactttattccacttcctccattacccagttttggcccacagagtttggtcccccccaaacctcggaccaatatccctctaaacatcaatctatcctcctgttaaagaaaaaaaaaaa

SEQ ID NO: 40 - protein, 412 aa, Homo sapiens
MPLQLLLLLILLGPGNSLQLWDTWADEAEKALGPLLARDRRQATEYEYLDYDFLPETEPPEMLRNSTDTTPLTGPGTPESTTVEPAARRSTGLDAGGAVTELTTELANMGNLSTDSAAMEIQTTQPAATEAQTTQPVPTEAQTTPLAATEAQTTRLTATEAQTTPLAATEAQTTPPAATEAQTTQPTGLEAQTTAPAAMEAQTTAPAAMEAQTTPPAAMEAQTTQTTAMEAQTTAPEATEAQTTQPTATEAQTTPLAAMEALSTEPSATEALSMEPTTKRGLFIPFSVSSVTHKGIPMAASNLSVNYPVGAPDHISVKQCLLAILILALVATIFFVCTVVLAVRLSRKGHMYPVRNYSPTEMVCISSLLPDGGEGPSATANGGLSKAKSPGLTPEPREDREGDDLTLHSFLP

SEQ ID NO: 41 - DNA, 2604 bp, Mus musculus
attctcgcttccttcttccacaccctgccgttgggggttggcgggcagattgggaccacaagtgtctggcagtgtggactggggccctgtcactgaggcagagtcgtttgcttctgggccctgaggcagctgccccatgctctgttgggcacggtaccatgtccccaagcttccttgtgctgctgaccatcttgggccctggcaacagccttcagctgcaggacccctgggggcatgaaaccaaggaagccccgggtcctgtgcatctccgggaacggaggcaggtggttggggatgacgattttgaggaccctgactatacgtataacacagaccccccagaattgctgaaaaatgtcaccaacaccgtggctgctcaccctgagctgccaaccaccgtggtcatgctagagagagattccacgagcgctggaacctccgagagagccactgagaagattgccaccactgaccctactgccccaggtacaggagggacagctgttgggatgctgagcacagactctgccacacagtggagtctaacctcagtagagaccgtccaaccagcatccacagaggtagagacctcgcagccagcacccatggaggcagagacctcgcagccagcacccatggaggcagagacctcgcagccagcacccatggaggcagagacctcgcagccagcacccatggaggcagacacctcgcagccagcacccatggaggcagacacctcaaagccagcacccacggaggcagagacctcaaagccagcacccacggaggcagagacctctcagccagcacccaacgaggcagagacctcaaaaccagcacccacggaggcagagacctcaaaaccagcacccacggaggcagagaccacccagcttcccaggattcaggctgtaaaaactctgtttacaacgtctgcagccaccgaagtcccttccacagaacctaccaccatggagacggcgtccacagagtctaacgagtctaccatcttccttgggccatccgtgactcacttacctgacagcggcctgaagaaagggctgattgtgacccctgggaattcacctgccccaaccctgccagggagttcagatctcatcccggtgaagcaatgtctgctgattatcctcatcttggcttctctggccaccatcttcctcgtgtgcacagtggtgctggcggtccgtctgtcccgtaagacccacatgtacccagtgcggaactactcccccacggagatgatctgcatctcgtccctgctacctgaggggggagacggggcccctgtcacagccaatgggggcctgcccaaggtccaggacctgaagacagagcccagtggggaccgggatggggacgacctcaccctgcacagcttcctcccttagactcccctgcctgcccacctaagcgagacctttgctagctccactctcacccgctggtcacagaggtcatagatctgggcttcctgggtgaaatgtattcacgggagtctttagagcgcccaccgctgtgtgtctccctgcaggtcactggatacctgtccttgcgttctccagaaagactcagctcccttattccactcccaaaagctactctgttggttgccatggtaacccggtaagagaggagctttgtgggaggccgccatgtctgcttctctgattccagtggcaggtagcctggctttcccaggtccctggcttggagggatggtccttcctttgggcccgtgtgaaccaacgagtttccgtacagtgacagaatgacctcgcgctgcggcctggcccagcacaggcatccaataaacatattataataaacgatagctgagtccttcatgtgcctaggctgccatctccagccctcccggagggcgcttagaccattgtccacaccgctcttagacatctaatacatgcttgggcaactgcaaggggcactggagggtttaagcgacacgtggtaggtagcatatgcccatcacccaagcagtacaggagttcaaggtcatccttggctcgttaactgcctgggctacatgagaccctgtctccgagaaaactaaagctgggtctggctggctggctcagccggtgaaggtgcttgctgctacgcctcatggcctaagctccaggggggccctcatggtggaaggagaaggctgactctccaaaactgttctctggcatccatactcacaggtaaatatgaacacaactacacaagctagagaactttattgaatctaccctttccaaggtgggtcaaaggaggaaggtccctttggtgttggccaatttctttttaaagatttatttatgtttatgagtatgctgtcactgtcttcagacacagcagaagagggcatcggatcccattacagacttgagccaccccgtgggtactgggaattgaactcaggaactctggaagagcagtcagtgctcttaacagctgagccatcccttcagcagccctgtcagatttttttttttaatcaccaaagagattttattcaagtttctaacacaaatgagttattttggttttgaattacagaactaagtccaaact

SEQ ID NO: 42 - protein, 417 aa, Mus musculus
MSPSFLVLLTILGPGNSLQLQDPWGHETKEAPGPVHLRERRQVVGDDDFEDPDYTYNTDPPELLKNVTNTVAAHPELPTTVVMLERDSTSAGTSERATEKIATTDPTAPGTGGTAVGMLSTDSATQWSLTSVETVQPASTEVETSQPAPMEAETSQPAPMEAETSQPAPMEAETSQPAPMEADTSQPAPMEADTSKPAPTEAETSKPAPTEAETSQPAPNEAETSKPAPTEAETSKPAPTEAETTQLPRIQAVKTLFTTSAATEVPSTEPTTMETASTESNESTIFLGPSVTHLPDSGLKKGLIVTPGNSPAPTLPGSSDLIPVKQCLLIILILASLATIFLVCTVVLAVRLSRKTHMYPVRNYSPTEMICISSLLPEGGDGAPVTANGGLPKVQDLKTEPSGDRDGDDLTLHSFLP

SEQ ID NO: 43 - DNA, 519 bp, Homo sapiens
cgttgtctcctccacctagcagttggttggcaaccccttcctcagtcccctgctgaaaaccctccagtcagcgcttatcccttctgctctctcccctcacccagagaaatacatggagtttgaccttaatggaaatggcgatattgatatcatgtccctgaaacgaatgctggagaaacttggagtccccaagactcacctagagctaaagaaattaattggagaggtgtccagtggctccggggagacgttcagctaccctgactttctcaggatgatgctgggcaagagatctgccatcctaaaaatgatcctgatgtatgaggaaaaagcgagagaaaaggaaaagccaacaggccccccagccaagaaagctatctctgagttgccctgatttgaagggaaaagggatgatgggattgaaggggcttctaatgacccagatatggaaacagaagacaaaattgtaagccagagtcaacaaattaaataaattaccccctcctccagatcaagtca

SEQ ID NO: 44 - DNA, 629 bp, Homo sapiens
aggggaaaggggaagtttgggaggaaggcttctgagaagactggtgggagagaaggagagcctgcagacagaggcctccagcttggaggaaaagctttcggactgctgaaggcccagcaggaagagaggctggatgagatcaacaagcaattcctagacgatcccaaatatagcagtgatgaggatctgccctccaaactggaaggcttcaaagagaaatacatggagtttgaccttaatggaaatggcgatattgatatcatgtccctgaaacgaatgctggagaaacttggagtccccaagactcacctagagctaaagaaattaattggagaggtgtccagtggctccggggagacgttcagctaccctgactttctcaggatgatgctgggcaagagatctgccatcctaaaaatgatcctgatgtatgaggaaaaagcgagagaaaaggaaaagccaacaggccccccagccaagaaagctatctctgagttgccctgatttgaagggaaaagggatgatgggattgaaggggcttctaatgacccagatatggaaacagaagacaaaattgtaagccagagtcaacaaattaaataaattaccccctcctccagatcaagtca

SEQ ID NO: 45 - protein, 93 aa, Homo sapiens
MEFDLNGNGDIDIMSLKRMLEKLGVPKTHLELKKLIGEVSSGSGETFSYPDFLRMMLGKRSAILKMILMYEEKAREKEKPTGPPAKKAISELP

SEQ ID NO: 46 - DNA, 690 bp, Homo sapiens
aggggaaaggggaagtttgggaggaaggcttctgagaagactggtgggagagaaggagagcctgcagacagaggcctccagcttggtctgtctccccacctctaccagcatctgctgagctatgagccaaaccagggatttacagggaggaaaagctttcggactgctgaaggcccagcaggaagagaggctggatgagatcaacaagcaattcctagacgatcccaaatatagcagtgatgaggatctgccctccaaactggaaggcttcaaagagaaatacatggagtttgaccttaatggaaatggcgatattgatatcatgtccctgaaacgaatgctggagaaacttggagtccccaagactcacctagagctaaagaaattaattggagaggtgtccagtggctccggggagacgttcagctaccctgactttctcaggatgatgctgggcaagagatctgccatcctaaaaatgatcctgatgtatgaggaaaaagcgagagaaaaggaaaagccaacaggccccccagccaagaaagctatctctgagttgccctgatttgaagggaaaagggatgatgggattgaaggggcttctaatgacccagatatggaaacagaagacaaaattgtaagccagagtcaacaaattaaataaattaccccctcctccagatcaagtca

SEQ ID NO: 47 - protein, 147 aa, Homo sapiens
MSQTRDLQGGKAFGLLKAQQEERLDEINKQFLDDPKYSSDEDLPSKLEGFKEKYMEFDLNGNGDIDIMSLKRMLEKLGVPKTHLELKKLIGEVSSGSGETFSYPDFLRMMLGKRSAILKMILMYEEKAREKEKPTGPPAKKAISELP

SEQ ID NO: 48 - DNA, 935 bp, Mus musculus
atcctattgtttccctgtcaggctcctccaaggcccaaactaactggagccagacgaaccctctgatgtggtctgcacagggcgctaggctcagctcaccccattcctggagcagcctgcagacttcatcctctctcttccatcccggggaaagtcagccagtcctcctcagctgcctgtcttaacctgcatcatgaagcctgaggagatttcaacagaagctgatgtggaagtgatgcctgggagttagcaagggaatgagtggaaaggggaagtgtgagaacggtcccagaagagactggggagctggtggagagaggacccagcggacagactgccagcctaagacaaccagcgtctgaggagccatgagccaaagcagggatttgcagggaggaaaagcttttggactgctgaaggcccagcaggaagagaggctggaggggatcaacaagcaattcctcgatgatcccaaatacagcaatgatgaggatctgccgtccaaacttgaagccttcaaggtgaagtacatggagtttgatctgaatggaaatggagatatcgatattatgtccttgaagcgaatgctggagaaacttggggttcccaagacccacctagagctgaagagattaattagagaggtgtccagtggctccgaggagacgttcagctactctgactttctcagaatgatgctgggcaagagatctgccatcttgagaatgattctgatgtatgaggagaaaaacaaagaacacaagaggccaactggtcccccagccaagaaagctatctccgagctgccctgattggaggtggatgtcacacggtggggctgagtgaggagcttctgatgacagcagcatggaaaaaagaaacagtcgtgagccagagtcagactaaataaatgacgctcctagtgggtcacatca

SEQ ID NO: 49 - DNA, 948 bp, Mus musculus
atcctattgtttccctgtcaggctcctccaaggcccaaactaactggagccagacgaaccctctgatgtggtctgcacagggcgctaggctcagctcaccccattcctggagcagcctgcagacttcatcctctctcttccatcccggggaaagtcagccagtcctcctcagctgcctgtcttaacctgcatcatgaagcctgaggagatttcaaaagctgatgtggaagtgatgcctgggagttagcaagggaatgagtggaaaggggaagtgtgagaacggtcccagaagagactggggagctggtggagagaggacccagcggacagactgccagcctaagacaaccagcgtctgaggagccatgagccaaagcagggatttgcagggaggaaaagcttttggactgctgaaggcccagcaggaagagaggctggaggggatcaacaagcaattcctcgatgatcccaaatacagcaatgatgaggatctgccgtccaaacttgaagccttcaaggtgaagtacatggagtttgatctgaatggaaatggagatatcgatattatgtccttgaagcgaatgctggagaaacttggggttcccaagacccacctagagctgaagagattaattagagaggtgtccagtggctccgaggagacgttcagctactctgactttctcagaatgatgctgggcaagagatctgccatcttgagaatgattctgatgtatgaggagaaaaacaaagaacacaagaggccaactggtcccccagccaagaaagctatctccgagctgccctgattggaggtggatgtcacacggtggggctgagtgaggagcttctgatgacagcagcatggaaaaaagaaacagtcgtgagccagagtcagactaaataaatgacgctcctagtgggtcacatcaaaaaaaaaaaaaaaaa

SEQ ID NO: 50 - protein, 147 aa, Mus musculus
MSQSRDLQGGKAFGLLKAQQEERLEGINKQFLDDPKYSNDEDLPSKLEAFKVKYMEFDLNGNGDIDIMSLKRMLEKLGVPKTHLELKRLIREVSSGSEETFSYSDFLRMMLGKRSAILRMILMYEEKNKEHKRPTGPPAKKAISELP

SEQ ID NO: 51 - DNA, 757 bp, Mus musculus
atcctattgtttccctgtcaggctcctccaaggcccaaactaactggagccagacgaaccctctgatgtggtctgcacagggcgctaggctcagctcaccccattcctggagcagcctgcagacttcatcctctctcttccatcccggggaaagtcagccagtcctcctcagctgcctgtcttaacctgcatcatgaagcctgaggagatttcaagaggaaaagcttttggactgctgaaggcccagcaggaagagaggctggaggggatcaacaagcaattcctcgatgatcccaaatacagcaatgatgaggatctgccgtccaaacttgaagccttcaaggtgaagtacatggagtttgatctgaatggaaatggagatatcgatattatgtccttgaagcgaatgctggagaaacttggggttcccaagacccacctagagctgaagagattaattagagaggtgtccagtggctccgaggagacgttcagctactctgactttctcagaatgatgctgggcaagagatctgccatcttgagaatgattctgatgtatgaggagaaaaacaaagaacacaagaggccaactggtcccccagccaagaaagctatctccgagctgccctgattggaggtggatgtcacacggtggggctgagtgaggagcttctgatgacagcagcatggaaaaaagaaacagtcgtgagccagagtcagactaaataaatgacgctcctagtgggtcacatca

SEQ ID NO: 52 - protein, 146 aa, Mus musculus
MKPEEISRGKAFGLLKAQQEERLEGINKQFLDDPKYSNDEDLPSKLEAFKVKYMEFDLNGNGDIDIMSLKRMLEKLGVPKTHLELKRLIREVSSGSEETFSYSDFLRMMLGKRSAILRMILMYEEKNKEHKRPTGPPAKKAISELP

SEQ ID NO: 53 - DNA, 8296 bp, Homo sapiens
ggaggaagaaaactcaagtgaaactgactctgctagaacagtgccgtgcttttccacagaaggttagaccctgaaagagatggctcagcaccacctatggatcttgctcctttgcctgcaaacctggccggaagcagctggaaaagactcagaaatcttcacagtgaatgggattctgggagagtcagtcactttccctgtaaatatccaagaaccacggcaagttaaaatcattgcttggacttctaaaacatctgttgcttatgtaacaccaggagactcagaaacagcacccgtagttactgtgacccacagaaattattatgaacggatacatgccttaggtccgaactacaatctggtcattagcgatctgaggatggaagacgcaggagactacaaagcagacataaatacacaggctgatccctacaccaccaccaagcgctacaacctgcaaatctatcgtcggcttgggaaaccaaaaattacacagagtttaatggcatctgtgaacagcacctgtaatgtcacactgacatgctctgtagagaaagaagaaaagaatgtgacatacaattggagtcccctgggagaagagggtaatgtccttcaaatcttccagactcctgaggaccaagagctgacttacacgtgtacagcccagaaccctgtcagcaacaattctgactccatctctgcccggcagctctgtgcagacatcgcaatgggcttccgtactcaccacaccgggttgctgagcgtgctggctatgttctttctgcttgttctcattctgtcttcagtgtttttgttccgtttgttcaagagaagacaaggtaggattttcccagaaggttcctgcttgaacaccttcactaagaacccttatgctgcctcaaagaaaaccatatacacatatatcatggcttcaaggaacacccagccagcagagtccagaatctatgatgaaatcctgcagtccaaggtgcttccctccaaggaagagccagtgaacacagtttattccgaagtgcagtttgctgataagatggggaaagccagcacacaggacagtaaacctcctgggacttcaagctatgaaattgtgatctaggctgctgggctgaattctccctctggaaactgagttacaaccaccaatactggcaggttccctggatccagatcttctctgcccaactcttactgggagattgcaaactgccacatctcagcctgtaagcaaagcaggaaaccttctgctgggcatagcttgtgcctaaatggacaaatggatgcatacccttcctgaaatgactcccttctgaatgaatgacaaagcaggttacctagtatagttttcccaaacttcttcccatcatagcacatgtagaaaataatatttttatggcacactgggataaacaagcaagattgctcacttctggaagctgcatatgactagaggcctcttgtgactggaggtaacaaccctgcccagtaactgtgggagaaggggatcaatattttgcacacctgtaataggccatggcacaccagccaagatgctctgctcacagtcagtatgtgtgaagatccctggtgcgtggccttcaccacgcatcttgagcaaattaggaaaatgtacccttcgcttgaggcagatgcagcccttcccccgagtgcatggcttggagagcagaatgtgggctgcatataagcacactcatccctttgtctgggaatctttgtgcagggcataacaggcttagtaagtccaaacacagatgacagtgctgtgtgggtctctgtcagagttgtggctctcagccatgtagacacactctccaaatggagtgttggaaaatgttctttctgcagggtctagagactgctgggacacttttcttggagtgctacttcagaagccttataggattttctttctggccaagatttccttctgtatcactccaagcagcctcagcagaagaagcagccatgcccagtattcccactctccaaaaggaactgaccagcttatatttctcacacttctggggaactgggtataatccaaccatcaaaatagaagaccttgcaagaagcagagtcattctccagaaggaacttgggagatgatggtgcagatgatgaaactgggttcatcccagttccaaagactcagagaactagagtttaagctgaggcagagtgccgccaccctggcatgccccacaaacagatcaccagccagcttacacaggcattaactctcctcaatgaggaagaatcattcacaactgagcaagacattcatatgatcatttaaggaagtgtttcccttatgtgttagcaagtataatcggctaactcctaaatcccaatgaatagtcctaggctggacagcaatgggctgcaattaggcagataaagacatcagtcccagtaaatgaatccatagactcatctagcaccaactaccattagcactatgttaggagctgcaaggccccaaagtagaagatgtgcataatgtctgctcttgtgtagctcaggagacaattccagcacagacactacagttaacgctgaactgcagctgcaagtaatagcatgaacagtcagaaaaataccttatgagggggcagggctgaagctgggccttgaaggatggatgaaatttggatagagaatgaggaagacagagggcctccaagtgagagaagcatgaaaaatgagcaggggcctggatcagtggggtgtattcagagcacctctccagatgcaccatgcatgctcacagtcccttgcctatgtgtggcagagtgtcccagccagatgtgtgccctcaccccatgtccatttacatgtccttcaatgcccacctcaaaaggtacctcttctgtaaagctttccctggtatcaggaatcaaaattaatcagggatcttttcacactgctgttttttcctctttggtccttctatcactaaaactcatctcattcagccttacagcataactaattatttgttttcctcactacattgtacatgtgggaattacagataaacggaagccggctggggtggtggctcacgcctgtaatcccaacactttgggaggccaaggcaggcggatcacctgaggtcaggagttcgagattagtctggccaacatggtgaaaccccatctctactaaaaatacgaaattagccaggtgtggtggcacacatctgtagtcccagctactctggaggctgagacaggagaatcgcttgaacccaggaagtggaggttgcagtgagctgagatcacaccactgcactccagcctgggagagacagagtgagactccatctcgaaaaaaaaaaaaagatagaagccaataagcatggtgcaatcaaattctggcaagcattaaatatcaggatgcagctgggcacggtggctcacgcctgtaatcccagcactttgggaggccaaggtgggcggatcacttgaggtcaggaatttgagaggatcctggccagcatggcaaaaccccatctgtacttaaaatacaaaaaaattagctgggcgtggtggtgcacacctgtaatcccagctacttgggaggctgaggtgggagaattgcttgaacctgggaggtggaggttgcagtgagctgagatcctgccactgcactccaggctgggcaacagagtgagaccatgtctcaaaaaataaaaataaaataaaataatatcaggatgcatacatcagaggctgttcctagtgtaaaggcactttggagggagaagactttcagagttaggcagaccaactaagaggtcagctgaagcacctaaccagttgtaaggaggtgaaagacagcaccccaagaagagacgtgcaggaaggaggaaagaggcttggtcataaaggatggaggaattccaaagtgacactgaacaggctgcgtttatcctaaaataaaaccactcctcactctgtggatgcgttgaagactcattcccaaacatctttattctctaacttgccctcttcctcttcctaatatgctcactcaagtaaaattactagtgtcctaatgcccctatgcatattgtcaaaaataaaaatcagaagcaggttagatctgttaggtcttccagaagagcaaacctgggatgaagccagagcccaggaattctgaaggtagcctttggactcaggacaccctactcttgtctctcctctcagtttctctgctatgaatctcctgattcatgaacacgttatctgttcacccttctctctaggtcttagttcttagattttccttctgtaaaatgcatgtgatcttattttcccctccacaactttccagatgaactagactgtgaccaagaggtctataaaatcaaagcatcatggaacaggatcttgtatcagaccaaagtgtgccagtttttaaaaatgtgcatcaaaatggaagtctcagagacagagccctctggtggaaagttctagtaggttaggacagtcctgcctgcagacaccttgggctttactgagggactcaactgagaaaatgaggaatgttgcagctcatgattcttagaagaagaaagtgaagcttgtttaaaatatgatttaaaaaatctgtagaacactgtaaactacacaggctatgagggaatagcctggttgggccagcttggaaatcgggcacaggcaggaaggggcctgtctggtttgggccgtgtccacagagagcacttcttaggtcctgcctggagagaaggaatggctgggctatattttcttccagactcattatttttcttctgtttgacttttctctgaatttcccttgatttgtataaattttctcaataattagtgacagtgtctactgattgtaaaatgaagcttgaaggccaggcgcagtggctcatgcctgtaatcctagaattttgggaggccaaggtgggtggatcacaaggagttcgagaccagcctggccaaggttgtgaaaccgcgtctctactaaaaatacaaaaaaattagccgggcatggtggcacgtgcctgtagtcccagctactcaggaagctgaggcaacagaatcacttgaacctgggaggtggaggttgcagtgagccgagatcacgccactgcactccagcctgggcgagagagtgagactccgtctcaaaaaaaaaaaaaaaaaaaaaagtttgaagaacaaagacaataagaggaaatataatgagtggtcataaatgtgggctctgacagtagagtgcctgggtctgcatcctggtttcttagtcatgtgaccttaggcaagttactttaacctcgctgtacctcaggttgtccatctgtaaaatggggataataatagtgcctaccttttaaggttgatgtggggattaaatgaggtgttgctcatacaggaatgtgcctgtgcatggcaaagttcgggaaattttttataagctgttctaggcctgaaatcttcagaagatgctaatctaaattcatgaaataagcttcttacaacagaaatgctgctagtattatgcaaaattaatgttgtatatcaaacttttaactctcatccctccttattcagatatattttgttataagcaatgtttgttcccctcgttattataccacagtctacttacctgatgctatatctgcctccccagttagactgagagaacaggggatatacctaaataataataataataataataataataaataataatggagagctccttgaagatagggagcctgtaagaatcattgagggcttattttgtataccaactgctaaactagatgcttcatacattgttgtcaatactcatgacagccttgtaaagtagaaattaattcttccagttaacactaaggctgacatatgaataccttggcaaatctggaaagctgggaagacagtatttgaattcaagacttcttgtcaccaagggccatgcacttgtactctgccatgtggcccttttttacctcctgtggattctccctacctggtacttggccttaggtgtacacacacctggcactttgcttgacacataataggtggaccacaaatatctactaaatgaatatttgcatatagtaatattttaaggtactaaaagcagctcaaagtaaatatattaatatattaattccattgctatctggataaccactcaactttcctgctgaaaatgcccatttaattaaagaaggttggatagagctctctatatgcattttggacaggcaggggtttcaggtcataaacattctgatgagttaatataaaataagagaaactgtaaatttccactactaaaaatcacaaaaataacagaaacaaaagaagagataagaatttggggaattgtgctgaacaatttagtggttaaaaaaaacaactgtgcatgtttagacttaaataagcccccatccaagtgtgaggggtccagtaatttttcaaaacatatgaaagtgttaatacatttcgacaaaggaccattaaaaaagtcctgaattctgacttgagggaggaaagtaatgactaatacattctctagagacttgcagactttgggaattcataaaggaatggatgataattattaactgttgctggctgattgcccagacagttctcaacagccctgtacaagtctctgggtttgggatggatcaattctgagactggaaaatggccaaatctttgcaaatgagaaatatttttcttataagttcttattgtaggcaaataattacatagattattcatcagagaatttttaaatgctcataatctcaactctttcatttacaacttgtatttccaatagtttatgggtcatctctgcatagatgtcagaagtcacctcaagtttagcgtgtccaaaatctaactcacaggtctgtttctgacctcccaacttgctttccttgtgtttttcctatgctaatgatccaccataatcaaaataattaacatttatccagtgcctactatgtactattccctgtcctgttttacatttactcatttaaagtccataagaaacattaaatctcatctgccttctgaagaagatacaaccatgctctcttttacaaagtaggaaactgggtcacagaaaggtgaagtctttaaggctgaatcacagtagctcatcctagtaaatagaaaagccaggattcaactccaggggctgggtgcagaactgctattcttcactgcttcaccaatcagcagctacccaaggcagaaaactttttcatccttggctccttcattctccctgtcaccccagatcccctctacatctagtcagagaataggtcctgtcaattccaacttctctatatggctcctctcaggcatgtgcccttaattggcctaattctctaatacaccttccctctacatgctcactccctcagatcattgctttatcacgtgttacctgggttgctattacataaagagcaatctttctaaaatgaggatcttatcacttcacttccacactaaaatgtttttcctggggaaccacactccttagcaatctgacccatcagaccttccaggctgtctcctgcctgctccctaaggctccagccacacagaattatcatgggcccacacacccaccaaatcctcccatgcctttgcccatgttgtctgggatgcccttctctcccttctgtctacatcaagcatcagactgaatatccctcttgtgcggccttctaaaacctcccgtccaaagcgaaatatattgccctctatttatacttttacagcatttggcacacaagtacagagtagtagctttttatcacattctctgataattatatagatatggtatttcttagctctctctccaactggctaataagttgctttttgtctgagtgcctaattttgtgttttgtgtctgagtgcctcagttcctcaaaaaaaggttttttgattagttcattattcatttgaacatggaaattatgctcactagtggcaaatgccactaaccgtattccagaagctaggtgtcatgtttgcaataagatatattatcccttctacaagtcaccttttatttcaggcatttgtaaatgcccattaataaagtatggttcataaattttaccttgtaagtgcctaagaaatgagactacaagctccatttcagcaggacacaataaatattattttataatgcatctaaaaaaaaaaaaaaaaaa

SEQ ID NO: 54 - protein, 345 aa, Homo sapiens
MAQHHLWILLLCLQTWPEAAGKDSEIFTVNGILGESVTFPVNIQEPRQVKIIAWTSKTSVAYVTPGDSETAPVVTVTHRNYYERIHALGPNYNLVISDLRMEDAGDYKADINTQADPYTTTKRYNLQIYRRLGKPKITQSLMASVNSTCNVTLTCSVEKEEKNVTYNWSPLGEEGNVLQIFQTPEDQELTYTCTAQNPVSNNSDSISARQLCADIAMGFRTHHTGLLSVLAMFFLLVLILSSVFLFRLFKRRQGRIFPEGSCLNTFTKNPYAASKKTIYTYIMASRNTQPAESRIYDEILQSKVLPSKEEPVNTVYSEVQFADKMGKASTQDSKPPGTSSYEIVI

SEQ ID NO: 55 - DNA, 8245 bp, Homo sapiens
ggaggaagaaaactcaagtgaaactgactctgctagaacagtgccgtgcttttccacagaaggttagaccctgaaagagatggctcagcaccacctatggatcttgctcctttgcctgcaaacctggccggaagcagctggaaaagactcagaaatcttcacagtgaatgggattctgggagagtcagtcactttccctgtaaatatccaagaaccacggcaagttaaaatcattgcttggacttctaaaacatctgttgcttatgtaacaccaggagactcagaaacagcacccgtagttactgtgacccacagaaattattatgaacggatacatgccttaggtccgaactacaatctggtcattagcgatctgaggatggaagacgcaggagactacaaagcagacataaatacacaggctgatccctacaccaccaccaagcgctacaacctgcaaatctatcgtcggcttgggaaaccaaaaattacacagagtttaatggcatctgtgaacagcacctgtaatgtcacactgacatgctctgtagagaaagaagaaaagaatgtgacatacaattggagtcccctgggagaagagggtaatgtccttcaaatcttccagactcctgaggaccaagagctgacttacacgtgtacagcccagaaccctgtcagcaacaattctgactccatctctgcccggcagctctgtgcagacatcgcaatgggcttccgtactcaccacaccgggttgctgagcgtgctggctatgttctttctgcttgttctcattctgtcttcagtgtttttgttccgtttgttcaagagaagacaagatgctgcctcaaagaaaaccatatacacatatatcatggcttcaaggaacacccagccagcagagtccagaatctatgatgaaatcctgcagtccaaggtgcttccctccaaggaagagccagtgaacacagtttattccgaagtgcagtttgctgataagatggggaaagccagcacacaggacagtaaacctcctgggacttcaagctatgaaattgtgatctaggctgctgggctgaattctccctctggaaactgagttacaaccaccaatactggcaggttccctggatccagatcttctctgcccaactcttactgggagattgcaaactgccacatctcagcctgtaagcaaagcaggaaaccttctgctgggcatagcttgtgcctaaatggacaaatggatgcatacccttcctgaaatgactcccttctgaatgaatgacaaagcaggttacctagtatagttttcccaaacttcttcccatcatagcacatgtagaaaataatatttttatggcacactgggataaacaagcaagattgctcacttctggaagctgcatatgactagaggcctcttgtgactggaggtaacaaccctgcccagtaactgtgggagaaggggatcaatattttgcacacctgtaataggccatggcacaccagccaagatgctctgctcacagtcagtatgtgtgaagatccctggtgcgtggccttcaccacgcatcttgagcaaattaggaaaatgtacccttcgcttgaggcagatgcagcccttcccccgagtgcatggcttggagagcagaatgtgggctgcatataagcacactcatccctttgtctgggaatctttgtgcagggcataacaggcttagtaagtccaaacacagatgacagtgctgtgtgggtctctgtcagagttgtggctctcagccatgtagacacactctccaaatggagtgttggaaaatgttctttctgcagggtctagagactgctgggacacttttcttggagtgctacttcagaagccttataggattttctttctggccaagatttccttctgtatcactccaagcagcctcagcagaagaagcagccatgcccagtattcccactctccaaaaggaactgaccagcttatatttctcacacttctggggaactgggtataatccaaccatcaaaatagaagaccttgcaagaagcagagtcattctccagaaggaacttgggagatgatggtgcagatgatgaaactgggttcatcccagttccaaagactcagagaactagagtttaagctgaggcagagtgccgccaccctggcatgccccacaaacagatcaccagccagcttacacaggcattaactctcctcaatgaggaagaatcattcacaactgagcaagacattcatatgatcatttaaggaagtgtttcccttatgtgttagcaagtataatcggctaactcctaaatcccaatgaatagtcctaggctggacagcaatgggctgcaattaggcagataaagacatcagtcccagtaaatgaatccatagactcatctagcaccaactaccattagcactatgttaggagctgcaaggccccaaagtagaagatgtgcataatgtctgctcttgtgtagctcaggagacaattccagcacagacactacagttaacgctgaactgcagctgcaagtaatagcatgaacagtcagaaaaataccttatgagggggcagggctgaagctgggccttgaaggatggatgaaatttggatagagaatgaggaagacagagggcctccaagtgagagaagcatgaaaaatgagcaggggcctggatcagtggggtgtattcagagcacctctccagatgcaccatgcatgctcacagtcccttgcctatgtgtggcagagtgtcccagccagatgtgtgccctcaccccatgtccatttacatgtccttcaatgcccacctcaaaaggtacctcttctgtaaagctttccctggtatcaggaatcaaaattaatcagggatcttttcacactgctgttttttcctctttggtccttctatcactaaaactcatctcattcagccttacagcataactaattatttgttttcctcactacattgtacatgtgggaattacagataaacggaagccggctggggtggtggctcacgcctgtaatcccaacactttgggaggccaaggcaggcggatcacctgaggtcaggagttcgagattagtctggccaacatggtgaaaccccatctctactaaaaatacgaaattagccaggtgtggtggcacacatctgtagtcccagctactctggaggctgagacaggagaatcgcttgaacccaggaagtggaggttgcagtgagctgagatcacaccactgcactccagcctgggagagacagagtgagactccatctcgaaaaaaaaaaaaagatagaagccaataagcatggtgcaatcaaattctggcaagcattaaatatcaggatgcagctgggcacggtggctcacgcctgtaatcccagcactttgggaggccaaggtgggcggatcacttgaggtcaggaatttgagaggatcctggccagcatggcaaaaccccatctgtacttaaaatacaaaaaaattagctgggcgtggtggtgcacacctgtaatcccagctacttgggaggctgaggtgggagaattgcttgaacctgggaggtggaggttgcagtgagctgagatcctgccactgcactccaggctgggcaacagagtgagaccatgtctcaaaaaataaaaataaaataaaataatatcaggatgcatacatcagaggctgttcctagtgtaaaggcactttggagggagaagactttcagagttaggcagaccaactaagaggtcagctgaagcacctaaccagttgtaaggaggtgaaagacagcaccccaagaagagacgtgcaggaaggaggaaagaggcttggtcataaaggatggaggaattccaaagtgacactgaacaggctgcgtttatcctaaaataaaaccactcctcactctgtggatgcgttgaagactcattcccaaacatctttattctctaacttgccctcttcctcttcctaatatgctcactcaagtaaaattactagtgtcctaatgcccctatgcatattgtcaaaaataaaaatcagaagcaggttagatctgttaggtcttccagaagagcaaacctgggatgaagccagagcccaggaattctgaaggtagcctttggactcaggacaccctactcttgtctctcctctcagtttctctgctatgaatctcctgattcatgaacacgttatctgttcacccttctctctaggtcttagttcttagattttccttctgtaaaatgcatgtgatcttattttcccctccacaactttccagatgaactagactgtgaccaagaggtctataaaatcaaagcatcatggaacaggatcttgtatcagaccaaagtgtgccagtttttaaaaatgtgcatcaaaatggaagtctcagagacagagccctctggtggaaagttctagtaggttaggacagtcctgcctgcagacaccttgggctttactgagggactcaactgagaaaatgaggaatgttgcagctcatgattcttagaagaagaaagtgaagcttgtttaaaatatgatttaaaaaatctgtagaacactgtaaactacacaggctatgagggaatagcctggttgggccagcttggaaatcgggcacaggcaggaaggggcctgtctggtttgggccgtgtccacagagagcacttcttaggtcctgcctggagagaaggaatggctgggctatattttcttccagactcattatttttcttctgtttgacttttctctgaatttcccttgatttgtataaattttctcaataattagtgacagtgtctactgattgtaaaatgaagcttgaaggccaggcgcagtggctcatgcctgtaatcctagaattttgggaggccaaggtgggtggatcacaaggagttcgagaccagcctggccaaggttgtgaaaccgcgtctctactaaaaatacaaaaaaattagccgggcatggtggcacgtgcctgtagtcccagctactcaggaagctgaggcaacagaatcacttgaacctgggaggtggaggttgcagtgagccgagatcacgccactgcactccagcctgggcgagagagtgagactccgtctcaaaaaaaaaaaaaaaaaaaaaagtttgaagaacaaagacaataagaggaaatataatgagtggtcataaatgtgggctctgacagtagagtgcctgggtctgcatcctggtttcttagtcatgtgaccttaggcaagttactttaacctcgctgtacctcaggttgtccatctgtaaaatggggataataatagtgcctaccttttaaggttgatgtggggattaaatgaggtgttgctcatacaggaatgtgcctgtgcatggcaaagttcgggaaattttttataagctgttctaggcctgaaatcttcagaagatgctaatctaaattcatgaaataagcttcttacaacagaaatgctgctagtattatgcaaaattaatgttgtatatcaaacttttaactctcatccctccttattcagatatattttgttataagcaatgtttgttcccctcgttattataccacagtctacttacctgatgctatatctgcctccccagttagactgagagaacaggggatatacctaaataataataataataataataataataaataataatggagagctccttgaagatagggagcctgtaagaatcattgagggcttattttgtataccaactgctaaactagatgcttcatacattgttgtcaatactcatgacagccttgtaaagtagaaattaattcttccagttaacactaaggctgacatatgaataccttggcaaatctggaaagctgggaagacagtatttgaattcaagacttcttgtcaccaagggccatgcacttgtactctgccatgtggcccttttttacctcctgtggattctccctacctggtacttggccttaggtgtacacacacctggcactttgcttgacacataataggtggaccacaaatatctactaaatgaatatttgcatatagtaatattttaaggtactaaaagcagctcaaagtaaatatattaatatattaattccattgctatctggataaccactcaactttcctgctgaaaatgcccatttaattaaagaaggttggatagagctctctatatgcattttggacaggcaggggtttcaggtcataaacattctgatgagttaatataaaataagagaaactgtaaatttccactactaaaaatcacaaaaataacagaaacaaaagaagagataagaatttggggaattgtgctgaacaatttagtggttaaaaaaaacaactgtgcatgtttagacttaaataagcccccatccaagtgtgaggggtccagtaatttttcaaaacatatgaaagtgttaatacatttcgacaaaggaccattaaaaaagtcctgaattctgacttgagggaggaaagtaatgactaatacattctctagagacttgcagactttgggaattcataaaggaatggatgataattattaactgttgctggctgattgcccagacagttctcaacagccctgtacaagtctctgggtttgggatggatcaattctgagactggaaaatggccaaatctttgcaaatgagaaatatttttcttataagttcttattgtaggcaaataattacatagattattcatcagagaatttttaaatgctcataatctcaactctttcatttacaacttgtatttccaatagtttatgggtcatctctgcatagatgtcagaagtcacctcaagtttagcgtgtccaaaatctaactcacaggtctgtttctgacctcccaacttgctttccttgtgtttttcctatgctaatgatccaccataatcaaaataattaacatttatccagtgcctactatgtactattccctgtcctgttttacatttactcatttaaagtccataagaaacattaaatctcatctgccttctgaagaagatacaaccatgctctcttttacaaagtaggaaactgggtcacagaaaggtgaagtctttaaggctgaatcacagtagctcatcctagtaaatagaaaagccaggattcaactccaggggctgggtgcagaactgctattcttcactgcttcaccaatcagcagctacccaaggcagaaaactttttcatccttggctccttcattctccctgtcaccccagatcccctctacatctagtcagagaataggtcctgtcaattccaacttctctatatggctcctctcaggcatgtgcccttaattggcctaattctctaatacaccttccctctacatgctcactccctcagatcattgctttatcacgtgttacctgggttgctattacataaagagcaatctttctaaaatgaggatcttatcacttcacttccacactaaaatgtttttcctggggaaccacactccttagcaatctgacccatcagaccttccaggctgtctcctgcctgctccctaaggctccagccacacagaattatcatgggcccacacacccaccaaatcctcccatgcctttgcccatgttgtctgggatgcccttctctcccttctgtctacatcaagcatcagactgaatatccctcttgtgcggccttctaaaacctcccgtccaaagcgaaatatattgccctctatttatacttttacagcatttggcacacaagtacagagtagtagctttttatcacattctctgataattatatagatatggtatttcttagctctctctccaactggctaataagttgctttttgtctgagtgcctaattttgtgttttgtgtctgagtgcctcagttcctcaaaaaaaggttttttgattagttcattattcatttgaacatggaaattatgctcactagtggcaaatgccactaaccgtattccagaagctaggtgtcatgtttgcaataagatatattatcccttctacaagtcaccttttatttcaggcatttgtaaatgcccattaataaagtatggttcataaattttaccttgtaagtgcctaagaaatgagactacaagctccatttcagcaggacacaataaatattattttataatgcatctaaaaaaaaaaaaaaaaaa

SEQ ID NO: 56 - protein, 328 aa, Homo sapiens
MAQHHLWILLLCLQTWPEAAGKDSEIFTVNGILGESVTFPVNIQEPRQVKIIAWTSKTSVAYVTPGDSETAPVVTVTHRNYYERIHALGPNYNLVISDLRMEDAGDYKADINTQADPYTTTKRYNLQIYRRLGKPKITQSLMASVNSTCNVTLTCSVEKEEKNVTYNWSPLGEEGNVLQIFQTPEDQELTYTCTAQNPVSNNSDSISARQLCADIAMGFRTHHTGLLSVLAMFFLLVLILSSVFLFRLFKRRQDAASKKTIYTYIMASRNTQPAESRIYDEILQSKVLPSKEEPVNTVYSEVQFADKMGKASTQDSKPPGTSSYEIVI

SEQ ID NO: 57 - DNA, 8147 bp, Homo sapiens
ggaggaagaaaactcaagtgaaactgactctgctagaacagtgccgtgcttttccacagaaggttagaccctgaaagagatggctcagcaccacctatggatcttgctcctttgcctgcaaacctggccggaagcagctggaaaagactcagaaatcttcacagtgaatgggattctgggagagtcagtcactttccctgtaaatatccaagaaccacggcaagttaaaatcattgcttggacttctaaaacatctgttgcttatgtaacaccaggagactcagaaacagcacccgtagttactgtgacccacagaaattattatgaacggatacatgccttaggtccgaactacaatctggtcattagcgatctgaggatggaagacgcaggagactacaaagcagacataaatacacaggctgatccctacaccaccaccaagcgctacaacctgcaaatctatcgtcggcttgggaaaccaaaaattacacagagtttaatggcatctgtgaacagcacctgtaatgtcacactgacatgctctgtagagaaagaagaaaagaatgtgacatacaattggagtcccctgggagaagagggtaatgtccttcaaatcttccagactcctgaggaccaagagctgacttacacgtgtacagcccagaaccctgtcagcaacaattctgactccatctctgcccggcagctctgtgcagacatcgcaatgggcttccgtactcaccacaccgggttgctgagcgtgctggctatgttctttctgcttgttctcattctgtcttcagtgtttttgttccgtttgttcaagagaagacaaggtgcttccctccaaggaagagccagtgaacacagtttattccgaagtgcagtttgctgataagatggggaaagccagcacacaggacagtaaacctcctgggacttcaagctatgaaattgtgatctaggctgctgggctgaattctccctctggaaactgagttacaaccaccaatactggcaggttccctggatccagatcttctctgcccaactcttactgggagattgcaaactgccacatctcagcctgtaagcaaagcaggaaaccttctgctgggcatagcttgtgcctaaatggacaaatggatgcatacccttcctgaaatgactcccttctgaatgaatgacaaagcaggttacctagtatagttttcccaaacttcttcccatcatagcacatgtagaaaataatatttttatggcacactgggataaacaagcaagattgctcacttctggaagctgcatatgactagaggcctcttgtgactggaggtaacaaccctgcccagtaactgtgggagaaggggatcaatattttgcacacctgtaataggccatggcacaccagccaagatgctctgctcacagtcagtatgtgtgaagatccctggtgcgtggccttcaccacgcatcttgagcaaattaggaaaatgtacccttcgcttgaggcagatgcagcccttcccccgagtgcatggcttggagagcagaatgtgggctgcatataagcacactcatccctttgtctgggaatctttgtgcagggcataacaggcttagtaagtccaaacacagatgacagtgctgtgtgggtctctgtcagagttgtggctctcagccatgtagacacactctccaaatggagtgttggaaaatgttctttctgcagggtctagagactgctgggacacttttcttggagtgctacttcagaagccttataggattttctttctggccaagatttccttctgtatcactccaagcagcctcagcagaagaagcagccatgcccagtattcccactctccaaaaggaactgaccagcttatatttctcacacttctggggaactgggtataatccaaccatcaaaatagaagaccttgcaagaagcagagtcattctccagaaggaacttgggagatgatggtgcagatgatgaaactgggttcatcccagttccaaagactcagagaactagagtttaagctgaggcagagtgccgccaccctggcatgccccacaaacagatcaccagccagcttacacaggcattaactctcctcaatgaggaagaatcattcacaactgagcaagacattcatatgatcatttaaggaagtgtttcccttatgtgttagcaagtataatcggctaactcctaaatcccaatgaatagtcctaggctggacagcaatgggctgcaattaggcagataaagacatcagtcccagtaaatgaatccatagactcatctagcaccaactaccattagcactatgttaggagctgcaaggccccaaagtagaagatgtgcataatgtctgctcttgtgtagctcaggagacaattccagcacagacactacagttaacgctgaactgcagctgcaagtaatagcatgaacagtcagaaaaataccttatgagggggcagggctgaagctgggccttgaaggatggatgaaatttggatagagaatgaggaagacagagggcctccaagtgagagaagcatgaaaaatgagcaggggcctggatcagtggggtgtattcagagcacctctccagatgcaccatgcatgctcacagtcccttgcctatgtgtggcagagtgtcccagccagatgtgtgccctcaccccatgtccatttacatgtccttcaatgcccacctcaaaaggtacctcttctgtaaagctttccctggtatcaggaatcaaaattaatcagggatcttttcacactgctgttttttcctctttggtccttctatcactaaaactcatctcattcagccttacagcataactaattatttgttttcctcactacattgtacatgtgggaattacagataaacggaagccggctggggtggtggctcacgcctgtaatcccaacactttgggaggccaaggcaggcggatcacctgaggtcaggagttcgagattagtctggccaacatggtgaaaccccatctctactaaaaatacgaaattagccaggtgtggtggcacacatctgtagtcccagctactctggaggctgagacaggagaatcgcttgaacccaggaagtggaggttgcagtgagctgagatcacaccactgcactccagcctgggagagacagagtgagactccatctcgaaaaaaaaaaaaagatagaagccaataagcatggtgcaatcaaattctggcaagcattaaatatcaggatgcagctgggcacggtggctcacgcctgtaatcccagcactttgggaggccaaggtgggcggatcacttgaggtcaggaatttgagaggatcctggccagcatggcaaaaccccatctgtacttaaaatacaaaaaaattagctgggcgtggtggtgcacacctgtaatcccagctacttgggaggctgaggtgggagaattgcttgaacctgggaggtggaggttgcagtgagctgagatcctgccactgcactccaggctgggcaacagagtgagaccatgtctcaaaaaataaaaataaaataaaataatatcaggatgcatacatcagaggctgttcctagtgtaaaggcactttggagggagaagactttcagagttaggcagaccaactaagaggtcagctgaagcacctaaccagttgtaaggaggtgaaagacagcaccccaagaagagacgtgcaggaaggaggaaagaggcttggtcataaaggatggaggaattccaaagtgacactgaacaggctgcgtttatcctaaaataaaaccactcctcactctgtggatgcgttgaagactcattcccaaacatctttattctctaacttgccctcttcctcttcctaatatgctcactcaagtaaaattactagtgtcctaatgcccctatgcatattgtcaaaaataaaaatcagaagcaggttagatctgttaggtcttccagaagagcaaacctgggatgaagccagagcccaggaattctgaaggtagcctttggactcaggacaccctactcttgtctctcctctcagtttctctgctatgaatctcctgattcatgaacacgttatctgttcacccttctctctaggtcttagttcttagattttccttctgtaaaatgcatgtgatcttattttcccctccacaactttccagatgaactagactgtgaccaagaggtctataaaatcaaagcatcatggaacaggatcttgtatcagaccaaagtgtgccagtttttaaaaatgtgcatcaaaatggaagtctcagagacagagccctctggtggaaagttctagtaggttaggacagtcctgcctgcagacaccttgggctttactgagggactcaactgagaaaatgaggaatgttgcagctcatgattcttagaagaagaaagtgaagcttgtttaaaatatgatttaaaaaatctgtagaacactgtaaactacacaggctatgagggaatagcctggttgggccagcttggaaatcgggcacaggcaggaaggggcctgtctggtttgggccgtgtccacagagagcacttcttaggtcctgcctggagagaaggaatggctgggctatattttcttccagactcattatttttcttctgtttgacttttctctgaatttcccttgatttgtataaattttctcaataattagtgacagtgtctactgattgtaaaatgaagcttgaaggccaggcgcagtggctcatgcctgtaatcctagaattttgggaggccaaggtgggtggatcacaaggagttcgagaccagcctggccaaggttgtgaaaccgcgtctctactaaaaatacaaaaaaattagccgggcatggtggcacgtgcctgtagtcccagctactcaggaagctgaggcaacagaatcacttgaacctgggaggtggaggttgcagtgagccgagatcacgccactgcactccagcctgggcgagagagtgagactccgtctcaaaaaaaaaaaaaaaaaaaaaagtttgaagaacaaagacaataagaggaaatataatgagtggtcataaatgtgggctctgacagtagagtgcctgggtctgcatcctggtttcttagtcatgtgaccttaggcaagttactttaacctcgctgtacctcaggttgtccatctgtaaaatggggataataatagtgcctaccttttaaggttgatgtggggattaaatgaggtgttgctcatacaggaatgtgcctgtgcatggcaaagttcgggaaattttttataagctgttctaggcctgaaatcttcagaagatgctaatctaaattcatgaaataagcttcttacaacagaaatgctgctagtattatgcaaaattaatgttgtatatcaaacttttaactctcatccctccttattcagatatattttgttataagcaatgtttgttcccctcgttattataccacagtctacttacctgatgctatatctgcctccccagttagactgagagaacaggggatatacctaaataataataataataataataataataaataataatggagagctccttgaagatagggagcctgtaagaatcattgagggcttattttgtataccaactgctaaactagatgcttcatacattgttgtcaatactcatgacagccttgtaaagtagaaattaattcttccagttaacactaaggctgacatatgaataccttggcaaatctggaaagctgggaagacagtatttgaattcaagacttcttgtcaccaagggccatgcacttgtactctgccatgtggcccttttttacctcctgtggattctccctacctggtacttggccttaggtgtacacacacctggcactttgcttgacacataataggtggaccacaaatatctactaaatgaatatttgcatatagtaatattttaaggtactaaaagcagctcaaagtaaatatattaatatattaattccattgctatctggataaccactcaactttcctgctgaaaatgcccatttaattaaagaaggttggatagagctctctatatgcattttggacaggcaggggtttcaggtcataaacattctgatgagttaatataaaataagagaaactgtaaatttccactactaaaaatcacaaaaataacagaaacaaaagaagagataagaatttggggaattgtgctgaacaatttagtggttaaaaaaaacaactgtgcatgtttagacttaaataagcccccatccaagtgtgaggggtccagtaatttttcaaaacatatgaaagtgttaatacatttcgacaaaggaccattaaaaaagtcctgaattctgacttgagggaggaaagtaatgactaatacattctctagagacttgcagactttgggaattcataaaggaatggatgataattattaactgttgctggctgattgcccagacagttctcaacagccctgtacaagtctctgggtttgggatggatcaattctgagactggaaaatggccaaatctttgcaaatgagaaatatttttcttataagttcttattgtaggcaaataattacatagattattcatcagagaatttttaaatgctcataatctcaactctttcatttacaacttgtatttccaatagtttatgggtcatctctgcatagatgtcagaagtcacctcaagtttagcgtgtccaaaatctaactcacaggtctgtttctgacctcccaacttgctttccttgtgtttttcctatgctaatgatccaccataatcaaaataattaacatttatccagtgcctactatgtactattccctgtcctgttttacatttactcatttaaagtccataagaaacattaaatctcatctgccttctgaagaagatacaaccatgctctcttttacaaagtaggaaactgggtcacagaaaggtgaagtctttaaggctgaatcacagtagctcatcctagtaaatagaaaagccaggattcaactccaggggctgggtgcagaactgctattcttcactgcttcaccaatcagcagctacccaaggcagaaaactttttcatccttggctccttcattctccctgtcaccccagatcccctctacatctagtcagagaataggtcctgtcaattccaacttctctatatggctcctctcaggcatgtgcccttaattggcctaattctctaatacaccttccctctacatgctcactccctcagatcattgctttatcacgtgttacctgggttgctattacataaagagcaatctttctaaaatgaggatcttatcacttcacttccacactaaaatgtttttcctggggaaccacactccttagcaatctgacccatcagaccttccaggctgtctcctgcctgctccctaaggctccagccacacagaattatcatgggcccacacacccaccaaatcctcccatgcctttgcccatgttgtctgggatgcccttctctcccttctgtctacatcaagcatcagactgaatatccctcttgtgcggccttctaaaacctcccgtccaaagcgaaatatattgccctctatttatacttttacagcatttggcacacaagtacagagtagtagctttttatcacattctctgataattatatagatatggtatttcttagctctctctccaactggctaataagttgctttttgtctgagtgcctaattttgtgttttgtgtctgagtgcctcagttcctcaaaaaaaggttttttgattagttcattattcatttgaacatggaaattatgctcactagtggcaaatgccactaaccgtattccagaagctaggtgtcatgtttgcaataagatatattatcccttctacaagtcaccttttatttcaggcatttgtaaatgcccattaataaagtatggttcataaattttaccttgtaagtgcctaagaaatgagactacaagctccatttcagcaggacacaataaatattattttataatgcatctaaaaaaaaaaaaaaaaaa

SEQ ID NO: 58 - protein, 272 aa, Homo sapiens
MAQHHLWILLLCLQTWPEAAGKDSEIFTVNGILGESVTFPVNIQEPRQVKIIAWTSKTSVAYVTPGDSETAPVVTVTHRNYYERIHALGPNYNLVISDLRMEDAGDYKADINTQADPYTTTKRYNLQIYRRLGKPKITQSLMASVNSTCNVTLTCSVEKEEKNVTYNWSPLGEEGNVLQIFQTPEDQELTYTCTAQNPVSNNSDSISARQLCADIAMGFRTHHTGLLSVLAMFFLLVLILSSVFLFRLFKRRQGASLQGRASEHSLFRSAVC

SEQ ID NO: 59 - DNA, 7903 bp, Homo sapiens
ggaggaagaaaactcaagtgaaactgactctgctagaacagtgccgtgcttttccacagaaggttagaccctgaaagagatggctcagcaccacctatggatcttgctcctttgcctgcaaacctgtcggcttgggaaaccaaaaattacacagagtttaatggcatctgtgaacagcacctgtaatgtcacactgacatgctctgtagagaaagaagaaaagaatgtgacatacaattggagtcccctgggagaagagggtaatgtccttcaaatcttccagactcctgaggaccaagagctgacttacacgtgtacagcccagaaccctgtcagcaacaattctgactccatctctgcccggcagctctgtgcagacatcgcaatgggcttccgtactcaccacaccgggttgctgagcgtgctggctatgttctttctgcttgttctcattctgtcttcagtgtttttgttccgtttgttcaagagaagacaagatgctgcctcaaagaaaaccatatacacatatatcatggcttcaaggaacacccagccagcagagtccagaatctatgatgaaatcctgcagtccaaggtgcttccctccaaggaagagccagtgaacacagtttattccgaagtgcagtttgctgataagatggggaaagccagcacacaggacagtaaacctcctgggacttcaagctatgaaattgtgatctaggctgctgggctgaattctccctctggaaactgagttacaaccaccaatactggcaggttccctggatccagatcttctctgcccaactcttactgggagattgcaaactgccacatctcagcctgtaagcaaagcaggaaaccttctgctgggcatagcttgtgcctaaatggacaaatggatgcatacccttcctgaaatgactcccttctgaatgaatgacaaagcaggttacctagtatagttttcccaaacttcttcccatcatagcacatgtagaaaataatatttttatggcacactgggataaacaagcaagattgctcacttctggaagctgcatatgactagaggcctcttgtgactggaggtaacaaccctgcccagtaactgtgggagaaggggatcaatattttgcacacctgtaataggccatggcacaccagccaagatgctctgctcacagtcagtatgtgtgaagatccctggtgcgtggccttcaccacgcatcttgagcaaattaggaaaatgtacccttcgcttgaggcagatgcagcccttcccccgagtgcatggcttggagagcagaatgtgggctgcatataagcacactcatccctttgtctgggaatctttgtgcagggcataacaggcttagtaagtccaaacacagatgacagtgctgtgtgggtctctgtcagagttgtggctctcagccatgtagacacactctccaaatggagtgttggaaaatgttctttctgcagggtctagagactgctgggacacttttcttggagtgctacttcagaagccttataggattttctttctggccaagatttccttctgtatcactccaagcagcctcagcagaagaagcagccatgcccagtattcccactctccaaaaggaactgaccagcttatatttctcacacttctggggaactgggtataatccaaccatcaaaatagaagaccttgcaagaagcagagtcattctccagaaggaacttgggagatgatggtgcagatgatgaaactgggttcatcccagttccaaagactcagagaactagagtttaagctgaggcagagtgccgccaccctggcatgccccacaaacagatcaccagccagcttacacaggcattaactctcctcaatgaggaagaatcattcacaactgagcaagacattcatatgatcatttaaggaagtgtttcccttatgtgttagcaagtataatcggctaactcctaaatcccaatgaatagtcctaggctggacagcaatgggctgcaattaggcagataaagacatcagtcccagtaaatgaatccatagactcatctagcaccaactaccattagcactatgttaggagctgcaaggccccaaagtagaagatgtgcataatgtctgctcttgtgtagctcaggagacaattccagcacagacactacagttaacgctgaactgcagctgcaagtaatagcatgaacagtcagaaaaataccttatgagggggcagggctgaagctgggccttgaaggatggatgaaatttggatagagaatgaggaagacagagggcctccaagtgagagaagcatgaaaaatgagcaggggcctggatcagtggggtgtattcagagcacctctccagatgcaccatgcatgctcacagtcccttgcctatgtgtggcagagtgtcccagccagatgtgtgccctcaccccatgtccatttacatgtccttcaatgcccacctcaaaaggtacctcttctgtaaagctttccctggtatcaggaatcaaaattaatcagggatcttttcacactgctgttttttcctctttggtccttctatcactaaaactcatctcattcagccttacagcataactaattatttgttttcctcactacattgtacatgtgggaattacagataaacggaagccggctggggtggtggctcacgcctgtaatcccaacactttgggaggccaaggcaggcggatcacctgaggtcaggagttcgagattagtctggccaacatggtgaaaccccatctctactaaaaatacgaaattagccaggtgtggtggcacacatctgtagtcccagctactctggaggctgagacaggagaatcgcttgaacccaggaagtggaggttgcagtgagctgagatcacaccactgcactccagcctgggagagacagagtgagactccatctcgaaaaaaaaaaaaagatagaagccaataagcatggtgcaatcaaattctggcaagcattaaatatcaggatgcagctgggcacggtggctcacgcctgtaatcccagcactttgggaggccaaggtgggcggatcacttgaggtcaggaatttgagaggatcctggccagcatggcaaaaccccatctgtacttaaaatacaaaaaaattagctgggcgtggtggtgcacacctgtaatcccagctacttgggaggctgaggtgggagaattgcttgaacctgggaggtggaggttgcagtgagctgagatcctgccactgcactccaggctgggcaacagagtgagaccatgtctcaaaaaataaaaataaaataaaataatatcaggatgcatacatcagaggctgttcctagtgtaaaggcactttggagggagaagactttcagagttaggcagaccaactaagaggtcagctgaagcacctaaccagttgtaaggaggtgaaagacagcaccccaagaagagacgtgcaggaaggaggaaagaggcttggtcataaaggatggaggaattccaaagtgacactgaacaggctgcgtttatcctaaaataaaaccactcctcactctgtggatgcgttgaagactcattcccaaacatctttattctctaacttgccctcttcctcttcctaatatgctcactcaagtaaaattactagtgtcctaatgcccctatgcatattgtcaaaaataaaaatcagaagcaggttagatctgttaggtcttccagaagagcaaacctgggatgaagccagagcccaggaattctgaaggtagcctttggactcaggacaccctactcttgtctctcctctcagtttctctgctatgaatctcctgattcatgaacacgttatctgttcacccttctctctaggtcttagttcttagattttccttctgtaaaatgcatgtgatcttattttcccctccacaactttccagatgaactagactgtgaccaagaggtctataaaatcaaagcatcatggaacaggatcttgtatcagaccaaagtgtgccagtttttaaaaatgtgcatcaaaatggaagtctcagagacagagccctctggtggaaagttctagtaggttaggacagtcctgcctgcagacaccttgggctttactgagggactcaactgagaaaatgaggaatgttgcagctcatgattcttagaagaagaaagtgaagcttgtttaaaatatgatttaaaaaatctgtagaacactgtaaactacacaggctatgagggaatagcctggttgggccagcttggaaatcgggcacaggcaggaaggggcctgtctggtttgggccgtgtccacagagagcacttcttaggtcctgcctggagagaaggaatggctgggctatattttcttccagactcattatttttcttctgtttgacttttctctgaatttcccttgatttgtataaattttctcaataattagtgacagtgtctactgattgtaaaatgaagcttgaaggccaggcgcagtggctcatgcctgtaatcctagaattttgggaggccaaggtgggtggatcacaaggagttcgagaccagcctggccaaggttgtgaaaccgcgtctctactaaaaatacaaaaaaattagccgggcatggtggcacgtgcctgtagtcccagctactcaggaagctgaggcaacagaatcacttgaacctgggaggtggaggttgcagtgagccgagatcacgccactgcactccagcctgggcgagagagtgagactccgtctcaaaaaaaaaaaaaaaaaaaaaagtttgaagaacaaagacaataagaggaaatataatgagtggtcataaatgtgggctctgacagtagagtgcctgggtctgcatcctggtttcttagtcatgtgaccttaggcaagttactttaacctcgctgtacctcaggttgtccatctgtaaaatggggataataatagtgcctaccttttaaggttgatgtggggattaaatgaggtgttgctcatacaggaatgtgcctgtgcatggcaaagttcgggaaattttttataagctgttctaggcctgaaatcttcagaagatgctaatctaaattcatgaaataagcttcttacaacagaaatgctgctagtattatgcaaaattaatgttgtatatcaaacttttaactctcatccctccttattcagatatattttgttataagcaatgtttgttcccctcgttattataccacagtctacttacctgatgctatatctgcctccccagttagactgagagaacaggggatatacctaaataataataataataataataataataaataataatggagagctccttgaagatagggagcctgtaagaatcattgagggcttattttgtataccaactgctaaactagatgcttcatacattgttgtcaatactcatgacagccttgtaaagtagaaattaattcttccagttaacactaaggctgacatatgaataccttggcaaatctggaaagctgggaagacagtatttgaattcaagacttcttgtcaccaagggccatgcacttgtactctgccatgtggcccttttttacctcctgtggattctccctacctggtacttggccttaggtgtacacacacctggcactttgcttgacacataataggtggaccacaaatatctactaaatgaatatttgcatatagtaatattttaaggtactaaaagcagctcaaagtaaatatattaatatattaattccattgctatctggataaccactcaactttcctgctgaaaatgcccatttaattaaagaaggttggatagagctctctatatgcattttggacaggcaggggtttcaggtcataaacattctgatgagttaatataaaataagagaaactgtaaatttccactactaaaaatcacaaaaataacagaaacaaaagaagagataagaatttggggaattgtgctgaacaatttagtggttaaaaaaaacaactgtgcatgtttagacttaaataagcccccatccaagtgtgaggggtccagtaatttttcaaaacatatgaaagtgttaatacatttcgacaaaggaccattaaaaaagtcctgaattctgacttgagggaggaaagtaatgactaatacattctctagagacttgcagactttgggaattcataaaggaatggatgataattattaactgttgctggctgattgcccagacagttctcaacagccctgtacaagtctctgggtttgggatggatcaattctgagactggaaaatggccaaatctttgcaaatgagaaatatttttcttataagttcttattgtaggcaaataattacatagattattcatcagagaatttttaaatgctcataatctcaactctttcatttacaacttgtatttccaatagtttatgggtcatctctgcatagatgtcagaagtcacctcaagtttagcgtgtccaaaatctaactcacaggtctgtttctgacctcccaacttgctttccttgtgtttttcctatgctaatgatccaccataatcaaaataattaacatttatccagtgcctactatgtactattccctgtcctgttttacatttactcatttaaagtccataagaaacattaaatctcatctgccttctgaagaagatacaaccatgctctcttttacaaagtaggaaactgggtcacagaaaggtgaagtctttaaggctgaatcacagtagctcatcctagtaaatagaaaagccaggattcaactccaggggctgggtgcagaactgctattcttcactgcttcaccaatcagcagctacccaaggcagaaaactttttcatccttggctccttcattctccctgtcaccccagatcccctctacatctagtcagagaataggtcctgtcaattccaacttctctatatggctcctctcaggcatgtgcccttaattggcctaattctctaatacaccttccctctacatgctcactccctcagatcattgctttatcacgtgttacctgggttgctattacataaagagcaatctttctaaaatgaggatcttatcacttcacttccacactaaaatgtttttcctggggaaccacactccttagcaatctgacccatcagaccttccaggctgtctcctgcctgctccctaaggctccagccacacagaattatcatgggcccacacacccaccaaatcctcccatgcctttgcccatgttgtctgggatgcccttctctcccttctgtctacatcaagcatcagactgaatatccctcttgtgcggccttctaaaacctcccgtccaaagcgaaatatattgccctctatttatacttttacagcatttggcacacaagtacagagtagtagctttttatcacattctctgataattatatagatatggtatttcttagctctctctccaactggctaataagttgctttttgtctgagtgcctaattttgtgttttgtgtctgagtgcctcagttcctcaaaaaaaggttttttgattagttcattattcatttgaacatggaaattatgctcactagtggcaaatgccactaaccgtattccagaagctaggtgtcatgtttgcaataagatatattatcccttctacaagtcaccttttatttcaggcatttgtaaatgcccattaataaagtatggttcataaattttaccttgtaagtgcctaagaaatgagactacaagctccatttcagcaggacacaataaatattattttataatgcatctaaaaaaaaaaaaaaaaaa

SEQ ID NO: 60 - protein, 214 aa, Homo sapiens
MAQHHLWILLLCLQTCRLGKPKITQSLMASVNSTCNVTLTCSVEKEEKNVTYNWSPLGEEGNVLQIFQTPEDQELTYTCTAQNPVSNNSDSISARQLCADIAMGFRTHHTGLLSVLAMFFLLVLILSSVFLFRLFKRRQDAASKKTIYTYIMASRNTQPAESRIYDEILQSKVLPSKEEPVNTVYSEVQFADKMGKASTQDSKPPGTSSYEIVI

SEQ ID NO: 61 - DNA, 8261 bp, Homo sapiens
ggaggaagaaaactcaagtgaaactgactctgctagaacagtgccgtgcttttccacagaaggttagaccctgaaagagatggctcagcaccacctatggatcttgctcctttgcctgcaaacctggccggaagcagctggaaaagactcagaaatcttcacagtgaatgggattctgggagagtcagtcactttccctgtaaatatccaagaaccacggcaagttaaaatcattgcttggacttctaaaacatctgttgcttatgtaacaccaggagactcagaaacagcacccgtagttactgtgacccacagaaattattatgaacggatacatgccttaggtccgaactacaatctggtcattagcgatctgaggatggaagacgcaggagactacaaagcagacataaatacacaggctgatccctacaccaccaccaagcgctacaacctgcaaatctatcgtcggcttgggaaaccaaaaattacacagagtttaatggcatctgtgaacagcacctgtaatgtcacactgacatgctctgtagagaaagaagaaaagaatgtgacatacaattggagtcccctgggagaagagggtaatgtccttcaaatcttccagactcctgaggaccaagagctgacttacacgtgtacagcccagaaccctgtcagcaacaattctgactccatctctgcccggcagctctgtgcagacatcgcaatgggcttccgtactcaccacaccgggttgctgagcgtgctggctatgttctttctgcttgttctcattctgtcttcagtgtttttgttccgtttgttcaagagaagacaaggttcctgcttgaacaccttcactaagaacccttatgctgcctcaaagaaaaccatatacacatatatcatggcttcaaggaacacccagccagcagagtccagaatctatgatgaaatcctgcagtccaaggtgcttccctccaaggaagagccagtgaacacagtttattccgaagtgcagtttgctgataagatggggaaagccagcacacaggacagtaaacctcctgggacttcaagctatgaaattgtgatctaggctgctgggctgaattctccctctggaaactgagttacaaccaccaatactggcaggttccctggatccagatcttctctgcccaactcttactgggagattgcaaactgccacatctcagcctgtaagcaaagcaggaaaccttctgctgggcatagcttgtgcctaaatggacaaatggatgcatacccttcctgaaatgactcccttctgaatgaatgacaaagcaggttacctagtatagttttcccaaacttcttcccatcatagcacatgtagaaaataatatttttatggcacactgggataaacaagcaagattgctcacttctggaagctgcatatgactagaggcctcttgtgactggaggtaacaaccctgcccagtaactgtgggagaaggggatcaatattttgcacacctgtaataggccatggcacaccagccaagatgctctgctcacagtcagtatgtgtgaagatccctggtgcgtggccttcaccacgcatcttgagcaaattaggaaaatgtacccttcgcttgaggcagatgcagcccttcccccgagtgcatggcttggagagcagaatgtgggctgcatataagcacactcatccctttgtctgggaatctttgtgcagggcataacaggcttagtaagtccaaacacagatgacagtgctgtgtgggtctctgtcagagttgtggctctcagccatgtagacacactctccaaatggagtgttggaaaatgttctttctgcagggtctagagactgctgggacacttttcttggagtgctacttcagaagccttataggattttctttctggccaagatttccttctgtatcactccaagcagcctcagcagaagaagcagccatgcccagtattcccactctccaaaaggaactgaccagcttatatttctcacacttctggggaactgggtataatccaaccatcaaaatagaagaccttgcaagaagcagagtcattctccagaaggaacttgggagatgatggtgcagatgatgaaactgggttcatcccagttccaaagactcagagaactagagtttaagctgaggcagagtgccgccaccctggcatgccccacaaacagatcaccagccagcttacacaggcattaactctcctcaatgaggaagaatcattcacaactgagcaagacattcatatgatcatttaaggaagtgtttcccttatgtgttagcaagtataatcggctaactcctaaatcccaatgaatagtcctaggctggacagcaatgggctgcaattaggcagataaagacatcagtcccagtaaatgaatccatagactcatctagcaccaactaccattagcactatgttaggagctgcaaggccccaaagtagaagatgtgcataatgtctgctcttgtgtagctcaggagacaattccagcacagacactacagttaacgctgaactgcagctgcaagtaatagcatgaacagtcagaaaaataccttatgagggggcagggctgaagctgggccttgaaggatggatgaaatttggatagagaatgaggaagacagagggcctccaagtgagagaagcatgaaaaatgagcaggggcctggatcagtggggtgtattcagagcacctctccagatgcaccatgcatgctcacagtcccttgcctatgtgtggcagagtgtcccagccagatgtgtgccctcaccccatgtccatttacatgtccttcaatgcccacctcaaaaggtacctcttctgtaaagctttccctggtatcaggaatcaaaattaatcagggatcttttcacactgctgttttttcctctttggtccttctatcactaaaactcatctcattcagccttacagcataactaattatttgttttcctcactacattgtacatgtgggaattacagataaacggaagccggctggggtggtggctcacgcctgtaatcccaacactttgggaggccaaggcaggcggatcacctgaggtcaggagttcgagattagtctggccaacatggtgaaaccccatctctactaaaaatacgaaattagccaggtgtggtggcacacatctgtagtcccagctactctggaggctgagacaggagaatcgcttgaacccaggaagtggaggttgcagtgagctgagatcacaccactgcactccagcctgggagagacagagtgagactccatctcgaaaaaaaaaaaaagatagaagccaataagcatggtgcaatcaaattctggcaagcattaaatatcaggatgcagctgggcacggtggctcacgcctgtaatcccagcactttgggaggccaaggtgggcggatcacttgaggtcaggaatttgagaggatcctggccagcatggcaaaaccccatctgtacttaaaatacaaaaaaattagctgggcgtggtggtgcacacctgtaatcccagctacttgggaggctgaggtgggagaattgcttgaacctgggaggtggaggttgcagtgagctgagatcctgccactgcactccaggctgggcaacagagtgagaccatgtctcaaaaaataaaaataaaataaaataatatcaggatgcatacatcagaggctgttcctagtgtaaaggcactttggagggagaagactttcagagttaggcagaccaactaagaggtcagctgaagcacctaaccagttgtaaggaggtgaaagacagcaccccaagaagagacgtgcaggaaggaggaaagaggcttggtcataaaggatggaggaattccaaagtgacactgaacaggctgcgtttatcctaaaataaaaccactcctcactctgtggatgcgttgaagactcattcccaaacatctttattctctaacttgccctcttcctcttcctaatatgctcactcaagtaaaattactagtgtcctaatgcccctatgcatattgtcaaaaataaaaatcagaagcaggttagatctgttaggtcttccagaagagcaaacctgggatgaagccagagcccaggaattctgaaggtagcctttggactcaggacaccctactcttgtctctcctctcagtttctctgctatgaatctcctgattcatgaacacgttatctgttcacccttctctctaggtcttagttcttagattttccttctgtaaaatgcatgtgatcttattttcccctccacaactttccagatgaactagactgtgaccaagaggtctataaaatcaaagcatcatggaacaggatcttgtatcagaccaaagtgtgccagtttttaaaaatgtgcatcaaaatggaagtctcagagacagagccctctggtggaaagttctagtaggttaggacagtcctgcctgcagacaccttgggctttactgagggactcaactgagaaaatgaggaatgttgcagctcatgattcttagaagaagaaagtgaagcttgtttaaaatatgatttaaaaaatctgtagaacactgtaaactacacaggctatgagggaatagcctggttgggccagcttggaaatcgggcacaggcaggaaggggcctgtctggtttgggccgtgtccacagagagcacttcttaggtcctgcctggagagaaggaatggctgggctatattttcttccagactcattatttttcttctgtttgacttttctctgaatttcccttgatttgtataaattttctcaataattagtgacagtgtctactgattgtaaaatgaagcttgaaggccaggcgcagtggctcatgcctgtaatcctagaattttgggaggccaaggtgggtggatcacaaggagttcgagaccagcctggccaaggttgtgaaaccgcgtctctactaaaaatacaaaaaaattagccgggcatggtggcacgtgcctgtagtcccagctactcaggaagctgaggcaacagaatcacttgaacctgggaggtggaggttgcagtgagccgagatcacgccactgcactccagcctgggcgagagagtgagactccgtctcaaaaaaaaaaaaaaaaaaaaaagtttgaagaacaaagacaataagaggaaatataatgagtggtcataaatgtgggctctgacagtagagtgcctgggtctgcatcctggtttcttagtcatgtgaccttaggcaagttactttaacctcgctgtacctcaggttgtccatctgtaaaatggggataataatagtgcctaccttttaaggttgatgtggggattaaatgaggtgttgctcatacaggaatgtgcctgtgcatggcaaagttcgggaaattttttataagctgttctaggcctgaaatcttcagaagatgctaatctaaattcatgaaataagcttcttacaacagaaatgctgctagtattatgcaaaattaatgttgtatatcaaacttttaactctcatccctccttattcagatatattttgttataagcaatgtttgttcccctcgttattataccacagtctacttacctgatgctatatctgcctccccagttagactgagagaacaggggatatacctaaataataataataataataataataataaataataatggagagctccttgaagatagggagcctgtaagaatcattgagggcttattttgtataccaactgctaaactagatgcttcatacattgttgtcaatactcatgacagccttgtaaagtagaaattaattcttccagttaacactaaggctgacatatgaataccttggcaaatctggaaagctgggaagacagtatttgaattcaagacttcttgtcaccaagggccatgcacttgtactctgccatgtggcccttttttacctcctgtggattctccctacctggtacttggccttaggtgtacacacacctggcactttgcttgacacataataggtggaccacaaatatctactaaatgaatatttgcatatagtaatattttaaggtactaaaagcagctcaaagtaaatatattaatatattaattccattgctatctggataaccactcaactttcctgctgaaaatgcccatttaattaaagaaggttggatagagctctctatatgcattttggacaggcaggggtttcaggtcataaacattctgatgagttaatataaaataagagaaactgtaaatttccactactaaaaatcacaaaaataacagaaacaaaagaagagataagaatttggggaattgtgctgaacaatttagtggttaaaaaaaacaactgtgcatgtttagacttaaataagcccccatccaagtgtgaggggtccagtaatttttcaaaacatatgaaagtgttaatacatttcgacaaaggaccattaaaaaagtcctgaattctgacttgagggaggaaagtaatgactaatacattctctagagacttgcagactttgggaattcataaaggaatggatgataattattaactgttgctggctgattgcccagacagttctcaacagccctgtacaagtctctgggtttgggatggatcaattctgagactggaaaatggccaaatctttgcaaatgagaaatatttttcttataagttcttattgtaggcaaataattacatagattattcatcagagaatttttaaatgctcataatctcaactctttcatttacaacttgtatttccaatagtttatgggtcatctctgcatagatgtcagaagtcacctcaagtttagcgtgtccaaaatctaactcacaggtctgtttctgacctcccaacttgctttccttgtgtttttcctatgctaatgatccaccataatcaaaataattaacatttatccagtgcctactatgtactattccctgtcctgttttacatttactcatttaaagtccataagaaacattaaatctcatctgccttctgaagaagatacaaccatgctctcttttacaaagtaggaaactgggtcacagaaaggtgaagtctttaaggctgaatcacagtagctcatcctagtaaatagaaaagccaggattcaactccaggggctgggtgcagaactgctattcttcactgcttcaccaatcagcagctacccaaggcagaaaactttttcatccttggctccttcattctccctgtcaccccagatcccctctacatctagtcagagaataggtcctgtcaattccaacttctctatatggctcctctcaggcatgtgcccttaattggcctaattctctaatacaccttccctctacatgctcactccctcagatcattgctttatcacgtgttacctgggttgctattacataaagagcaatctttctaaaatgaggatcttatcacttcacttccacactaaaatgtttttcctggggaaccacactccttagcaatctgacccatcagaccttccaggctgtctcctgcctgctccctaaggctccagccacacagaattatcatgggcccacacacccaccaaatcctcccatgcctttgcccatgttgtctgggatgcccttctctcccttctgtctacatcaagcatcagactgaatatccctcttgtgcggccttctaaaacctcccgtccaaagcgaaatatattgccctctatttatacttttacagcatttggcacacaagtacagagtagtagctttttatcacattctctgataattatatagatatggtatttcttagctctctctccaactggctaataagttgctttttgtctgagtgcctaattttgtgttttgtgtctgagtgcctcagttcctcaaaaaaaggttttttgattagttcattattcatttgaacatggaaattatgctcactagtggcaaatgccactaaccgtattccagaagctaggtgtcatgtttgcaataagatatattatcccttctacaagtcaccttttatttcaggcatttgtaaatgcccattaataaagtatggttcataaattttaccttgtaagtgcctaagaaatgagactacaagctccatttcagcaggacacaataaatattattttataatgcatcta

SEQ ID NO: 62 - protein, 339 aa, Homo sapiens
MAQHHLWILLLCLQTWPEAAGKDSEIFTVNGILGESVTFPVNIQEPRQVKIIAWTSKTSVAYVTPGDSETAPVVTVTHRNYYERIHALGPNYNLVISDLRMEDAGDYKADINTQADPYTTTKRYNLQIYRRLGKPKITQSLMASVNSTCNVTLTCSVEKEEKNVTYNWSPLGEEGNVLQIFQTPEDQELTYTCTAQNPVSNNSDSISARQLCADIAMGFRTHHTGLLSVLAMFFLLVLILSSVFLFRLFKRRQGSCLNTFTKNPYAASKKTIYTYIMASRNTQPAESRIYDEILQSKVLPSKEEPVNTVYSEVQFADKMGKASTQDSKPPGTSSYEIVI

SEQ ID NO: 63 - DNA, 3290 bp, Mus musculus
agtgcttggagttcctctgtgactgaccacttcttccttttctgtctaatggtgaacacctttctggaccagctctggaccagaatctgatttatgctctgctccggaaacaccacactgaagtgaaagcagctaccacaccagttatttttcctcagaagactggagtctgactggacatggcccagcgccatctgtggatctggttcctttgcctacaaacctggtctgaagcagcaggaaaagatgcagacccggtggtaatgaatgggattcttggggagtcagttactttcctcttaaatattcaagaaccaaagaaaattgacaacattgcctggacttctcaatcatctgttgcttttataaaaccaggagtcaataaagctgaagttaccataacccagggcacttataaaggacgaatagaaatcatagatcagaagtatgacctggtcattagagacctgaggatggaagatgcaggaacttacaaagcagacatcaatgaagagaatgaggaaaccatcaccaagatctactaccttcatatctaccgtcgacttaaaacaccaaaaattacacagagtttgatatcatctttgaacaatacctgtaatatcacactgacatgctctgtggaaaaggaagaaaaggatgtcacatatagctggagtccctttggagagaaaagcaatgtccttcaaatcgtccactcccccatggaccaaaaactgacctacacatgtacagcccagaaccctgtcagcaacagttctgactctgtcactgtccagcagccatgtacagacactccaagcttccatcctcgccatgctgtgttgccaggaggattggccgtgctctttctgcttattctcattccgatgttggcatttctgttccgtttgtataagagaaggcgagacaggattgtcctggaagcagatgatgtctcaaagaaaacagtatatgctgtagtttcaagaaatgctcaacccacagagtccagaatctatgatgaaatccctcagtccaagatgctgtcctgtaagaaagatccggtgaccaccatttattcctcagtgcagctttctgagaagatgaaggaaaccaacatgaaggacagaagtctgcctaaggctttgggtaatgaaattgttgtctaggtgattctctaagaccacgaaggacacaaggacaagtcatctatgaggattgaatcaacggtttcagtcttttggatataacctgggccagccaagggatttaggaatgaagcaagctccgtgggtagaggtctgatccccagtgtgtaatgttaggggccatgtacaggattgactctcaggcccacagatctttacccagagaaaccctgacctgctcccatgctgtttttcctggggaaaggaccctagggcactcaacctttatgcaatcagacatgcctctcagagactgtctaacagcttccagactaatctctgtgcagtacttagtcttacaactctcacgggcaacggcttcaagttccaattttacgatgtgtctagcctgggatgactgtttagtttctaatgtggcgagaatgtatgttaccatgtaggaagcacagactatggcaatctataaatgatttgtggcatgagactgatgtccgaatttaggggaaggggaatggtcttacttaggcattttatggaaattgagtctctctccccgagaagagggtgatgaagcagcatccacgtctgcctcttctccagtaacctgcttgttatcgacaatgtccagccgatggtaatgaactgaaacaaatgcgcttgaaagagatgaatcaatttgagatttaacaaatcgggtcaatttctgaaatgcccaaggaccgaaggagatcaataataggagtcccaataggggccctaaaagggagggcaacaaggttgaaagtcagggggaggttgaaaaccagttttggtagtctaccttccccctaggccattgtaaatacttgtgtatgggtgtaactcagctatctatagttctaagtatccactctggttcctctttaggtcttaaacttccttcttcctagttgatggtaaattcctgtgtaaggcagtggcctagcttttattcaaagtgatagtgtaatgccagaggctattctgaatgtcactgaataggcaacactctccctgaattctaagtccatggtctgttcaagggctttttaggacattggaacaccagtgaaggcttagctatgtcagaattcaatcttaaaatgcacttataataagataatattaaaagagagcacatggatctatacaccagactaactcgggaatagaatatgagtacaaaatgggcagtatgcagctgctgaactaaggctgtggtagataccttttcaaagtttgcattcccagatttttaaaccaaggatcgtttcctaactctaataggcagcaaaacgtaagcaggtctctaacaaaaacataacagtagattccttatctaaattaggatctacacaattagttaattgacaagaattacaatgaatataaaaagacttgccaagattggcgatcttaactcttaaaattatctaacaataagcatataggtaaggtacacaaactttcatagctataaggagctgacctgaaaggccaaaaacagtgtctctgacaaaagcatcttgtacattctctgtaccagtctttttgcctcatgagtcagcttttttagttgtttttattttaagttggcaccaggttggtactccttgctgcagcccatggcggagatacgaagtttctttatctgtttgtaagtggctgctctctgatttctcttcttttgtatactcaacatagctttctggtcaccactgtcagggcactcacaggtcacaggtcagcctgtcacattggaagctagcatgctcttgtagcattctgtggaaaaaacagaaacattctcccttttccccatattaagtatctgaacaggatcatggcaagtgccaataagtggatcctttttatctgtcctagacatcattatatctagtttgttttttttttgtaaataaaaatgtgattttatgtgcacagggatataattcctaccttctttgtttttaaagaaggtatagtttttaaagttttacaataccttgtctttgagaattataaaatatctcagtaacatgtgtaacattaaattgttaacaaaacatctcttggaggttttgaaaataaaaattttgaagc

SEQ ID NO: 64 - protein, 329 aa, Mus musculus
MAQRHLWIWFLCLQTWSEAAGKDADPVVMNGILGESVTFLLNIQEPKKIDNIAWTSQSSVAFIKPGVNKAEVTITQGTYKGRIEIIDQKYDLVIRDLRMEDAGTYKADINEENEETITKIYYLHIYRRLKTPKITQSLISSLNNTCNITLTCSVEKEEKDVTYSWSPFGEKSNVLQIVHSPMDQKLTYTCTAQNPVSNSSDSVTVQQPCTDTPSFHPRHAVLPGGLAVLFLLILIPMLAFLFRLYKRRRDRIVLEADDVSKKTVYAVVSRNAQPTESRIYDEIPQSKMLSCKKDPVTTIYSSVQLSEKMKETNMKDRSLPKALGNEIVV

SEQ ID NO: 65 - DNA, 3520 bp, Mus musculus
agtgcttggagttcctctgtgactgaccacttcttccttttctgtctaatggtgaacacctttctggaccagctctggaccagaatctgatttatgctctgctccggaaacaccacactgaagtgaaagcagctaccacaccagttatttttcctcagaagactggagtctgactggacatggcccagcgccatctgtggatctggttcctttgcctacaaacctggtctgaagcagcaggaaaagatgcagacccggtggtaatgaatgggattcttggggagtcagttactttcctcttaaatattcaagaaccaaagaaaattgacaacattgcctggacttctcaatcatctgttgcttttataaaaccaggagtcaataaagctgaagttaccataacccagggcacttataaaggacgaatagaaatcatagatcagaagtatgacctggtcattagagacctgaggatggaagatgcaggaacttacaaagcagacatcaatgaagagaatgaggaaaccatcaccaagatctactaccttcatatctaccgtaagttatggcagcacggggccttggatttacttttgatttgaagatttatgatctaaaccacacccatatttctgataacagagtttcctaactcttcttatccttataattacataagcacatcagtacttataaaggtctaactttacttctggccttgacagactttagctgtaatctgttttgcagcagaatttgtcctctgttctttgttttcctttcctataaaatgtcaataatcatattaatcaatttgtaagcattattatgacattctagtaagaaactatatgcagagtggtctttataaggcttctgcttttaagataattacagaatgcataggaaaatgcaaagaactatgaaaggatgtgttctgtgcccttctcttgccctctcctctgttatactagatccaaactcttagtctcatcccccgtcttatacagaccttctggggtagcctttcttcattgtctctcctgattccaaagagataaaataagcagatcctggcacacacctttgattccagcactcaggaggcaaagacagaaggatctctatgagttcaaggctagcttggtcttcagagaaagttccagaacagccaagactaacaaaaagaaaccctttctcaaaccaacctcccatccccatcctcaccccccaaaaactactagaatgaaagaaaaaaaaataccaagacacaaaatgaacagtgtctgaggaactcttatttctgtaagtattaatactttcagaaatgcagaacagtgttcaaggtcaaaaacagaaaattggaactttcttggaatgtgccagcacttacttaggaatggaatcacttatattcctatagaatttaatcacatatatagcaccggacagcattaatcacatatatagcaccggacatcataagcaaggtagtagtgaagcaccatcccaacattttcttgtctcagttctgcagggcagagaactgttagccctgactccagctttttctacctaacagttttgtgcaggtgacatctcgtccctgctgagaaaatgaaatgagatttagttttcaccactatggctgtaccaatacctaccccaacgggtggcacacacacacacacacacacacacacacacacacacacacacacacacacgtctctccgaaaataggtaaataatgatacttttcttgtgtttcggctattttggaatattcagagcctactgttgtagaatagctgggataaaatggagacatcctgcccaggctgttattgactgtgcttttttgttggcatctaggcatctgggactgggatgattataaatctaggtgatgatgtttggatttgtctttgttgggtgggtggcttgttccttgttttctgtttcctctctggattttcagagagtgtggtagctctatgttttagtaggacattttctttggatctgacatttatagccactggaggttctcaataaaagatgtttctgggtattgggagctaacacttaggacctgtgataggttaggagtatgaaagtgttcataggagagagaagaagagtgtttagccaggatctgtttatttcatccccttggaatcagggagacagtaaagtgaggtcaacccacagggtcttctctagatactggggatgagactgggaagttggatctagaggaacagaaggaaacaggaagatatacaggctcctatctgcttctgggcaggaatgatctgggttagcagggagtgcctgctgaagatgagggctgggataaaccaacaagtggggagaaggtgggtagaaagggaagatctgtggaaccacaatagatgtgggattggggatgtgcaggagtggggacattagaaggaaggctgcagcaggtgttctgttgcagagctagggatgaagctggagctttagatttgtaggagaggaagccttctgttagcttacatgtttcccaggcctgcttgggtggtgtgttcacaaggaacactggttttggggacttgtttactggaatgaattgggggaaggaaggttggagtagaagatagaggtcctcaaagagaaaattaataagtccacaaaatccaaacaaacagtggaaagaagtgaataaactgtataagacttgaaaatgaaaataaaatcaataaagaaaactaaaaccgagagaattctagaaatgaaaattttaagaatttgaacagaaattacagaggtaaacttcaccaacaaaatatgagagatggaagagagaatattaggcattgaagatacaatagagaaaatgaatatatcagtcaaagaaaatgttaaaccaaaaaaaaaaagtcctaacaaaaaatacaaaaaatttaggacactaagaaaagacaaaacctaagactaatagaaatataggaaggaaaagaattctacctcaaaggcccagaaaatatttcaacaaaatcatagaagaaaaattttctcacctaaagaagatagatgcctataaggtatatgaagcatatataacaacaaatagatttaacaagaaaataaactctccttggcacataacagtcaaatcacaaagcatacagaacaaagaaagaatattaaaagctacaaggggaaaaggccaagtagtatataaatgcagacctagaatgatacctgatttctcagtgaagactctaaaggccaatagagtctggacaaatgtgctataaactctaagagaccccagaggtcatccctgattactatacccaccaaaatatccaacatcctaaatggaaaaaataggatattccataataaagccaaatttaaacaatatctgtctacaaatccatctatagaagatgacagggcggaaaattccaaccaaaagagtttaactataccaaataaaaacaaaaggaataaacaatctcaaagc

SEQ ID NO: 66 - protein, 140 aa, Mus musculus
MAQRHLWIWFLCLQTWSEAAGKDADPVVMNGILGESVTFLLNIQEPKKIDNIAWTSQSSVAFIKPGVNKAEVTITQGTYKGRIEIIDQKYDLVIRDLRMEDAGTYKADINEENEETITKIYYLHIYRKLWQHGALDLLLI

SEQ ID NO: 67 - DNA, 3287 bp, Mus musculus
agtgcttggagttcctctgtgactgaccacttcttccttttctgtctaatggtgaacacctttctggaccagctctggaccagaatctgatttatgctctgctccggaaacaccacactgaagtgaaagcagctaccacaccagttatttttcctcagaagactggagtctgactggacatggcccagcgccatctgtggatctggttcctttgcctacaaacctggtctgaagcagcaggaaaagatgcagacccggtggtaatgaatgggattcttggggagtcagttactttcctcttaaatattcaagaaccaaagaaaattgacaacattgcctggacttctcaatcatctgttgcttttataaaaccaggagtcaataaagctgaagttaccataacccagggcacttataaaggacgaatagaaatcatagatcagaagtatgacctggtcattagagacctgaggatggaagatgcaggaacttacaaagcagacatcaatgaagagaatgaggaaaccatcaccaagatctactaccttcatatctaccgtcgacttaaaacaccaaaaattacacagagtttgatatcatctttgaacaatacctgtaatatcacactgacatgctctgtggaaaaggaagaaaaggatgtcacatatagctggagtccctttggagagaaaagcaatgtccttcaaatcgtccactcccccatggaccaaaaactgacctacacatgtacagcccagaaccctgtcagcaacagttctgactctgtcactgtccagcagccatgtacagacactccaagcttccatcctcgccatgctgtgttgccaggaggattggccgtgctctttctgcttattctcattccgatgttggcatttctgttccgtttgtataagagaaggcgagacaggattgtcctggaagatgatgtctcaaagaaaacagtatatgctgtagtttcaagaaatgctcaacccacagagtccagaatctatgatgaaatccctcagtccaagatgctgtcctgtaagaaagatccggtgaccaccatttattcctcagtgcagctttctgagaagatgaaggaaaccaacatgaaggacagaagtctgcctaaggctttgggtaatgaaattgttgtctaggtgattctctaagaccacgaaggacacaaggacaagtcatctatgaggattgaatcaacggtttcagtcttttggatataacctgggccagccaagggatttaggaatgaagcaagctccgtgggtagaggtctgatccccagtgtgtaatgttaggggccatgtacaggattgactctcaggcccacagatctttacccagagaaaccctgacctgctcccatgctgtttttcctggggaaaggaccctagggcactcaacctttatgcaatcagacatgcctctcagagactgtctaacagcttccagactaatctctgtgcagtacttagtcttacaactctcacgggcaacggcttcaagttccaattttacgatgtgtctagcctgggatgactgtttagtttctaatgtggcgagaatgtatgttaccatgtaggaagcacagactatggcaatctataaatgatttgtggcatgagactgatgtccgaatttaggggaaggggaatggtcttacttaggcattttatggaaattgagtctctctccccgagaagagggtgatgaagcagcatccacgtctgcctcttctccagtaacctgcttgttatcgacaatgtccagccgatggtaatgaactgaaacaaatgcgcttgaaagagatgaatcaatttgagatttaacaaatcgggtcaatttctgaaatgcccaaggaccgaaggagatcaataataggagtcccaataggggccctaaaagggagggcaacaaggttgaaagtcagggggaggttgaaaaccagttttggtagtctaccttccccctaggccattgtaaatacttgtgtatgggtgtaactcagctatctatagttctaagtatccactctggttcctctttaggtcttaaacttccttcttcctagttgatggtaaattcctgtgtaaggcagtggcctagcttttattcaaagtgatagtgtaatgccagaggctattctgaatgtcactgaataggcaacactctccctgaattctaagtccatggtctgttcaagggctttttaggacattggaacaccagtgaaggcttagctatgtcagaattcaatcttaaaatgcacttataataagataatattaaaagagagcacatggatctatacaccagactaactcgggaatagaatatgagtacaaaatgggcagtatgcagctgctgaactaaggctgtggtagataccttttcaaagtttgcattcccagatttttaaaccaaggatcgtttcctaactctaataggcagcaaaacgtaagcaggtctctaacaaaaacataacagtagattccttatctaaattaggatctacacaattagttaattgacaagaattacaatgaatataaaaagacttgccaagattggcgatcttaactcttaaaattatctaacaataagcatataggtaaggtacacaaactttcatagctataaggagctgacctgaaaggccaaaaacagtgtctctgacaaaagcatcttgtacattctctgtaccagtctttttgcctcatgagtcagcttttttagttgtttttattttaagttggcaccaggttggtactccttgctgcagcccatggcggagatacgaagtttctttatctgtttgtaagtggctgctctctgatttctcttcttttgtatactcaacatagctttctggtcaccactgtcagggcactcacaggtcacaggtcagcctgtcacattggaagctagcatgctcttgtagcattctgtggaaaaaacagaaacattctcccttttccccatattaagtatctgaacaggatcatggcaagtgccaataagtggatcctttttatctgtcctagacatcattatatctagtttgttttttttttgtaaataaaaatgtgattttatgtgcacagggatataattcctaccttctttgtttttaaagaaggtatagtttttaaagttttacaataccttgtctttgagaattataaaatatctcagtaacatgtgtaacattaaattgttaacaaaacatctcttggaggttttgaaaataaaaattttgaagc

SEQ ID NO: 68 - protein, 328 aa, Mus musculus
MAQRHLWIWFLCLQTWSEAAGKDADPVVMNGILGESVTFLLNIQEPKKIDNIAWTSQSSVAFIKPGVNKAEVTITQGTYKGRIEIIDQKYDLVIRDLRMEDAGTYKADINEENEETITKIYYLHIYRRLKTPKITQSLISSLNNTCNITLTCSVEKEEKDVTYSWSPFGEKSNVLQIVHSPMDQKLTYTCTAQNPVSNSSDSVTVQQPCTDTPSFHPRHAVLPGGLAVLFLLILIPMLAFLFRLYKRRRDRIVLEDDVSKKTVYAVVSRNAQPTESRIYDEIPQSKMLSCKKDPVTTIYSSVQLSEKMKETNMKDRSLPKALGNEIVV

SEQ ID NO: 69 - DNA, 1062 bp, Homo sapiens
ccttctgaaaaaagaaagccaactttcctttcaaatacacaccccaacccgccccggcatacacagaaatggggactgcgagcagaagcaacatcgctcgccatctgcaaaccaatctcattctattttgtgtcggtgctgtgggcgcctgtactctctctgtcacacaaccgtggtacctagaagtggactacactcatgaggccgtcaccataaagtgtaccttctccgcaaccggatgcccttctgagcaaccaacatgcctgtggtttcgctacggtgctcaccagcctgagaacctgtgcttggacgggtgcaaaagtgaggcagacaagttcacagtgagggaggccctcaaagaaaaccaagtttccctcactgtaaacagagtgacttcaaatgacagtgcaatttacatctgtggaatagcattccccagtgtgccggaagcgagagctaaacagacaggaggagggaccacactggtggtaagagaaattaagctgctcagcaaggaactgcggagcttcctgacagctcttgtatcactgctctctgtctatgtgaccggtgtgtgcgtggccttcatactcctctccaaatcaaaatccaaccctctaagaaacaaagaaataaaagaagactcacaaaagaagaagagtgctcggcgtatttttcaggaaattgctcaagaactataccataagagacatgtggaaacaaatcagcaatctgagaaagataacaacacttatgaaaacagaagagtactttccaactatgaaaggccatagaaacgttttaattttcaatgaagtcactgaaaatccaactccaggagctatggcagtgttaatgaacatatatcatcaggtcttaaaaaaaaataaaggtaaactgaaaagacaactggctacaaagaaggatgtcagaatgtaaggaaactataactaatagtcattaccaaaatactaaaacccaacaaaatgcaactgaaaaataccttccaaatttgccaagaaaaaaaattctattttaaacttgaaaaaaaaaaaaaaaaaa

SEQ ID NO: 70 - protein, 241 aa, Homo sapiens
MGTASRSNIARHLQTNLILFCVGAVGACTLSVTQPWYLEVDYTHEAVTIKCTFSATGCPSEQPTCLWFRYGAHQPENLCLDGCKSEADKFTVREALKENQVSLTVNRVTSNDSAIYICGIAFPSVPEARAKQTGGGTTLVVREIKLLSKELRSFLTALVSLLSVYVTGVCVAFILLSKSKSNPLRNKEIKEDSQKKKSARRIFQEIAQELYHKRHVETNQQSEKDNNTYENRRVLSNYERP

SEQ ID NO: 71 - DNA, 2133 bp, Mus musculus
ggagaaggcggcacatgcagcagagatgggccccgtgagtgcacgcaggagccgcctccggccagagatcagcctgatccttttccaagtcggtatggtgggtgcctgcactgtgtatgtgctgcaaccaggttacctagaagtggactacggttctgacgccgtcaccatggagtgtaacttttctacagttggatgccctccagtgccaccaaagagcttgtggtttcgctgtggtactcaccagcctgaagctctgtgcttggatggatgcagaaatgaggcagacaagttcacagtgaaagaaaccctggacccggaccaagtcttcctcactgttaacaggctgtctccaaatgacagtgcaatttacatctgtggaatagcatttcccaatgaactgtcaccaagcgctaaacacgttggaaaggggactacactggtggtaagagaaagacttttcagcaaggaggtgcgcagtttcctgatagtgctcttagctctgctctctgtctacatcaccggtgtgtgtgtgaccttcatagtcctcttcaaatcaaaatctaacggtccaagaagcagagaaaccaaaggctcaaaaaagaagagtgctcggcgtatctttcaggaaattgctcaagaattataccataagagatatgtggaaacaagtcatctacctgagcaagagggcactgatgaaaacagaaaagcactccccaaccctggaagagcatagatgtgcttgctttttacttaagccactgacagtgcaactccagaatctacggcaatgtgaatggacatacagcaatcaagacaacatcaaagagagctggggtatagctcagctggcagagtgcttgcctagtaggcacaaagccctagctttgatccccagcaccacataaactcatcaaagtgaaacaagcctgtattcccaacattgtgaagtataaagagtcagaagttcaaggtcatccctgagtataggattaacctgaagtcagagacacatcatcttgtctcaaaagcaaccgtgaccaccaaaagaaaaggacaggacaagtgggaaaacagccggcctcgccagacggcagagcataagtagctgtcactaattgtagctacagaatatgaaaacctcaagaaaactcaactggaggaccttttttctaattttccaagaatagtctaaaaagccccactttgaagaaaaaacttcatcttaacagtttttaaaaactgttaccatgtttatgttgtcagtctacccaacatactagatgtgtgataggcattaactgagagaaggcttcaagttaaaccacagatctcagttctgaggggaaataaatactttcctgagttgtaaaaatgatgaaacaattagaatcaagtgagaagggcaaaaggagtaaggagaagagcaatttctgagtaagagaaactcattgtgaacagtatcttggaacaaaagtgatttcttctgatactgtaacggagcagtgggcagtgaacattctccagctgaggtataggaaacaacttgggttgtaccaccaacaaaacaatactacaagagaccagaggacgactataaacaggaaacccaaagcctatcagaaatgcctcaggaatgcagacaactgactctagatgtcagtgtggtaccaaagaactgcagccctagtgagcttgaaaggagggtcggatacaacaagggcctcactatctcactaaggtgacctgagccaggcatgctggcacacacctttaatcctaacactaaggaggcagaggcaggtgaatttctgagttcaaggccagcctgatctatagatcgagttccaggacagccagggctgttaacagaaaaacactgtctcagaaaaaaagggagtgggggcttgacatggattgttctttgaatataagtaccaacaaggacacactgctcactaacttgatcacaggtctagtacagttgcttctaaacaggtactaaatataaatggcacacactcttaaacatcacacactgtgatacacacatacacacacacacacacacacacacacaggtttgaaatttacatacacaaaaggaataaaataatggcatacacagta

SEQ ID NO: 72 - protein, 237 aa, Mus musculus
MGPVSARRSRLRPEISLILFQVGMVGACTVYVLQPGYLEVDYGSDAVTMECNFSTVGCPPVPPKSLWFRCGTHQPEALCLDGCRNEADKFTVKETLDPDQVFLTVNRLSPNDSAIYICGIAFPNELSPSAKHVGKGTTLVVRERLFSKEVRSFLIVLLALLSVYITGVCVTFIVLFKSKSNGPRSRETKGSKKKSARRIFQEIAQELYHKRYVETSHLPEQEGTDENRKALPNPGRA

SEQ ID NO: 73 - DNA, 1155 bp, Homo sapiens
gtttggtaagttccgtttttagccccggcctttttctagccaggctctcaactgtctcctgcgttgctgggaagttctggaaggaagcatgtgctccagaggttgggattcgtgtctggctctggaattgctactgctgcctctgtcactcctggtgaccagcattcaaggtcacttggtacatatgaccgtggtctccggcagcaacgtgactctgaacatctctgagagcctgcctgagaactacaaacaactaacctggttttatactttcgaccagaagattgtagaatgggattccagaaaatctaagtactttgaatccaaatttaaaggcagggtcagacttgatcctcagagtggcgcactgtacatctctaaggtccagaaagaggacaacagcacctacatcatgagggtgttgaaaaagactgggaatgagcaagaatggaagatcaagctgcaagtgcttgaccctgtacccaagcctgtcatcaaaattgagaagatagaagacatggatgacaactgttatctgaaactgtcatgtgtgatacctggcgagtctgtaaactacacctggtatggggacaaaaggcccttcccaaaggagctccagaacagtgtgcttgaaaccacccttatgccacataattactccaggtgttatacttgccaagtcagcaattctgtgagcagcaagaatggcacggtctgcctcagtccaccctgtaccctggcccggtcctttggagtagaatggattgcaagttggctagtggtcacggtgcccaccattcttggcctgttacttacctgagatgagctcttttaactcaagcgaaacttcaaggccagaagatcttgcctgttggtgatcatgctcctcaccaggacagagactgtataggctgaccagaagcatgctgctgaattatcaacgaggattttcaagttaacttttaaatactggttattatttaattttatatccctttgttgttttctagtacacagagatatagagatacacatgcttttttcccacccaaaattgtgacaacattatgtgaatgttttattattttttaaaataaacatttgatataattgtcaattaactgaaaaaaaaaaaaaaaaaaaaaaaaaaaaaaa

SEQ ID NO: 74 - protein, 243 aa, Homo sapiens
MCSRGWDSCLALELLLLPLSLLVTSIQGHLVHMTVVSGSNVTLNISESLPENYKQLTWFYTFDQKIVEWDSRKSKYFESKFKGRVRLDPQSGALYISKVQKEDNSTYIMRVLKKTGNEQEWKIKLQVLDPVPKPVIKIEKIEDMDDNCYLKLSCVIPGESVNYTWYGDKRPFPKELQNSVLETTLMPHNYSRCYTCQVSNSVSSKNGTVCLSPPCTLARSFGVEWIASWLVVTVPTILGLLLT

SEQ ID NO: 75 - DNA, 1537 bp, Homo sapiens
gtttggtaagttccgtttttagccccggcctttttctagccaggctctcaactgtctcctgcgttgctgggaagttctggaaggaagcatgtgctccagaggttgggattcgtgtctggctctggaattgctactgctgcctctgtcactcctggtgaccagcattcaaggtcacttggtacatatgaccgtggtctccggcagcaacgtgactctgaacatctctgagagcctgcctgagaactacaaacaactaacctggttttatactttcgaccagaagattgtagaatgggattccagaaaatctaagtactttgaatccaaatttaaaggcagggtcagacttgatcctcagagtggcgcactgtacatctctaaggtccagaaagaggacaacagcacctacatcatgagggtgttgaaaaagactgggaatgagcaagaatggaagatcaagctgcaagtgcttgaccctgtacccaagcctgtcatcaaaattgagaagatagaagacatggatgacaactgttatctgaaactgtcatgtgtgatacctggcgagtctgtaaactacacctggtatggggacaaaaggcccttcccaaaggagctccagaacagtgtgcttgaaaccacccttatgccacataattactccaggtgttatacttgccaagtcagcaattctgtgagcagcaagaatggcacggtctgcctcagtccaccctgtaccctgggtaagaaggatccctgggagctgaggggggcacagggtaactggagttgttttgaacaaagaaaggctgggggtcctattcagcctccttgcacagtgtggtggtgaatccctaaggtgtctgggagagctgggagacgtgggttctgccaccagctctaccaccacctcccagccagcttacctcaacttcgtgggggctcagtgttctcacctgcaaaggacgtttgggagagatctctgatactcctcttccctctcccgctctaacaaagcatagtcctaacatctgaggccagggtcatcatagagtagactgaaacatcagggtgagcagggagaaggaagggcaagtgggcgagcagctgtctagaggggcttcattagacagccgaagtcagccaaggaaagagggaccgaggtcattagaccgccaaagtcagccagggaaagagggactgaggagacgggcctgagagaggccgtcgaggaggcgtgagagcctgagcctcaggcgaagcttctcctccccagcctgatgttcctagatgaacttaggaagccagattcccctgtctcctgggaggatccactcatgagtgtcacacctggctctagatcaggcctacactggtgctagcatgggacagctaaggccatgggttttagagtcagtcatacctggggtcacttctaggactgtcacttactagctaaacaagttacttagcttccccaagtcatgttcttcctaaataaaggacaaaataacagttcctataaaaaaaaaaaaaaaaa

SEQ ID NO: 76 - protein, 252 aa, Homo sapiens
MCSRGWDSCLALELLLLPLSLLVTSIQGHLVHMTVVSGSNVTLNISESLPENYKQLTWFYTFDQKIVEWDSRKSKYFESKFKGRVRLDPQSGALYISKVQKEDNSTYIMRVLKKTGNEQEWKIKLQVLDPVPKPVIKIEKIEDMDDNCYLKLSCVIPGESVNYTWYGDKRPFPKELQNSVLETTLMPHNYSRCYTCQVSNSVSSKNGTVCLSPPCTLGKKDPWELRGAQGNWSCFEQRKAGGPIQPPCTVWW

SEQ ID NO: 77 - DNA, 1205 bp, Mus musculus
atacgacttccggttttgggttttgcttcctgattgaagggcaggcgccctgacttctcttacagttgtctccagtgttctggggaagcttctctaagtattatgtgcttcataaaacagggatggtgtctggtcctggaactgctactgctgcccttgggaactggatttcaaggtcattcaataccagatataaatgccaccaccggcagcaatgtaaccctgaaaatccataaggacccacttggaccatataaacgtatcacctggcttcatactaaaaatcagaagattttagagtacaactataatagtacaaagacaatcttcgagtctgaatttaaaggcagggtttatcttgaagaaaacaatggtgcacttcatatctctaatgtccggaaagaggacaaaggtacctactacatgagagtgctgcgtgaaactgagaacgagttgaagataaccctggaagtatttgatcctgtgcccaagccttccatagaaatcaataagactgaagcgtcgactgattcctgtcacctgaggctatcgtgtgaggtaaaggaccagcatgttgactatacttggtatgagagctcgggacctttccccaaaaagagtccaggatatgtgctcgatctcatcgtcacaccacagaacaagtctacattttacacctgccaagtcagcaatcctgtaagcagcaagaacgacacagtgtacttcactctaccttgtgatctagccagatcttctggagtatgttggactgcaacttggctagtggtcacaacactcatcattcacaggatcctgttaacctgacaagaactcttctcacccaagaaggcaacttggaagcacagagtcttgccttcatccctagcagtgttcctagccagcgaagcaactctggctctattggacaaaggaaaatgtgttactgaacgtctgcgagagtttgcatgcatgctctatgaaacaagcacaggaccttgtacagtgctccaccactgacctgtgtgcccagtcctttacaaagatttcaaatcaaccttttaaaaactgtgcataatatctaattttatataccctagttgtttcccaacatatattaaagataaatgcattctttttaccaaaatgtgactatattattttcatgttttcatatctctttttaaaataaattcttttaaaaaact

SEQ ID NO: 78 - protein, 240 aa, Mus musculus
MCFIKQGWCLVLELLLLPLGTGFQGHSIPDINATTGSNVTLKIHKDPLGPYKRITWLHTKNQKILEYNYNSTKTIFESEFKGRVYLEENNGALHISNVRKEDKGTYYMRVLRETENELKITLEVFDPVPKPSIEINKTEASTDSCHLRLSCEVKDQHVDYTWYESSGPFPKKSPGYVLDLIVTPQNKSTFYTCQVSNPVSSKNDTVYFTLPCDLARSSGVCWTATWLVVTTLIIHRILLT

SEQ ID NO: 79 - DNA, 938 bp, Mus musculus
atacgacttccggttttgggttttgcttcctgattgaagggcaggcgccctgacttctcttacagttgtctccagtgttctggggaagcttctctaagtattatgtgcttcataaaacagggatggtgtctggtcctggaactgctactgctgcccttgggaactggatttcaaggtcattcaataccagatataaatgccaccaccggcagcaatgtaaccctgaaaatccataaggacccacttggaccatataaacgtatcacctggcttcatactaaaaatcagaagattttagagtacaactataatagtacaaagacaatcttcgagtctgaatttaaaggcagggtttatcttgaagaaaacaatggtgcacttcatatctctaatgtccggaaagaggacaaaggtacctactacatgagagtgctgcgtgaaactgagaacgagttgaagataaccctggaagtatttgccagatcttctggagtatgttggactgcaacttggctagtggtcacaacactcatcattcacaggatcctgttaacctgacaagaactcttctcacccaagaaggcaacttggaagcacagagtcttgccttcatccctagcagtgttcctagccagcgaagcaactctggctctattggacaaaggaaaatgtgttactgaacgtctgcgagagtttgcatgcatgctctatgaaacaagcacaggaccttgtacagtgctccaccactgacctgtgtgcccagtcctttacaaagatttcaaatcaaccttttaaaaactgtgcataatatctaattttatataccctagttgtttcccaacatatattaaagataaatgcattctttttaccaaaatgtgactatattattttcatgttttcatatctctttttaaaataaattcttttaaaaaact

SEQ ID NO: 80 - protein, 151 aa, Mus musculus
MCFIKQGWCLVLELLLLPLGTGFQGHSIPDINATTGSNVTLKIHKDPLGPYKRITWLHTKNQKILEYNYNSTKTIFESEFKGRVYLEENNGALHISNVRKEDKGTYYMRVLRETENELKITLEVFARSSGVCWTATWLVVTTLIIHRILLT

SEQ ID NO: 81 - DNA, 1466 bp, Homo sapiens
tctgctcacacaggaagccctggaagctgcttcctcagacatgccgctgctgctactgctgcccctgctgtgggcaggggccctggctatggatccaaatttctggctgcaagtgcaggagtcagtgacggtacaggagggtttgtgcgtcctcgtgccctgcactttcttccatcccataccctactacgacaagaactccccagttcatggttactggttccgggaaggagccattatatccagggactctccagtggccacaaacaagctagatcaagaagtacaggaggagactcagggcagattccgcctccttggggatcccagtaggaacaactgctccctgagcatcgtagacgccaggaggagggataatggttcatacttctttcggatggagagaggaagtaccaaatacagttacaaatctccccagctctctgtgcatgtgacagacttgacccacaggcccaaaatcctcatccctggcactctagaacccggccactccaaaaacctgacctgctctgtgtcctgggcctgtgagcagggaacacccccgatcttctcctggttgtcagctgcccccacctccctgggccccaggactactcactcctcggtgctcataatcaccccacggccccaggaccacggcaccaacctgacctgtcaggtgaagttcgctggagctggtgtgactacggagagaaccatccagctcaacgtcacctatgttccacagaacccaacaactggtatctttccaggagatggctcagggaaacaagagaccagagcaggagtggttcatggggccattggaggagctggtgttacagccctgctcgctctttgtctctgcctcatcttcttcatagtgaagacccacaggaggaaagcagccaggacagcagtgggcaggaatgacacccaccctaccacagggtcagcctccccgaaacaccagaagaagtccaagttacatggccccactgaaacctcaagctgttcaggtgccgcccctactgtggagatggatgaggagctgcattatgcttccctcaactttcatgggatgaatccttccaaggacacctccaccgaatactcagaggtcaggacccagtgaggaacccacaagagcatcaggctcagctagaagatccacatcctctacaggtcggggaccaaaggctgattcttggagatttaacaccccacaggcaatgggtttatagacattatgtgagtttcctgctatattaacatcatcttagactttgcaagcagagagtcgtggaatcaaatctgtgctctttcatttgctaagtgtatgatgtcacacaagctccttaaccttccatgtctccattttcttctctgtgaagtaggtataagaagtcctatctcatagggatgctgtgagcattaaataaaggtacacatggaaaacaccagtc

SEQ ID NO: 82 - protein, 364 aa, Homo sapiens
MPLLLLLPLLWAGALAMDPNFWLQVQESVTVQEGLCVLVPCTFFHPIPYYDKNSPVHGYWFREGAIISRDSPVATNKLDQEVQEETQGRFRLLGDPSRNNCSLSIVDARRRDNGSYFFRMERGSTKYSYKSPQLSVHVTDLTHRPKILIPGTLEPGHSKNLTCSVSWACEQGTPPIFSWLSAAPTSLGPRTTHSSVLIITPRPQDHGTNLTCQVKFAGAGVTTERTIQLNVTYVPQNPTTGIFPGDGSGKQETRAGVVHGAIGGAGVTALLALCLCLIFFIVKTHRRKAARTAVGRNDTHPTTGSASPKHQKKSKLHGPTETSSCSGAAPTVEMDEELHYASLNFHGMNPSKDTSTEYSEVRTQ

SEQ ID NO: 83 - DNA, 1085 bp, Homo sapiens
tctgctcacacaggaagccctggaagctgcttcctcagacatgccgctgctgctactgctgcccctgctgtgggcagacttgacccacaggcccaaaatcctcatccctggcactctagaacccggccactccaaaaacctgacctgctctgtgtcctgggcctgtgagcagggaacacccccgatcttctcctggttgtcagctgcccccacctccctgggccccaggactactcactcctcggtgctcataatcaccccacggccccaggaccacggcaccaacctgacctgtcaggtgaagttcgctggagctggtgtgactacggagagaaccatccagctcaacgtcacctatgttccacagaacccaacaactggtatctttccaggagatggctcagggaaacaagagaccagagcaggagtggttcatggggccattggaggagctggtgttacagccctgctcgctctttgtctctgcctcatcttcttcatagtgaagacccacaggaggaaagcagccaggacagcagtgggcaggaatgacacccaccctaccacagggtcagcctccccgaaacaccagaagaagtccaagttacatggccccactgaaacctcaagctgttcaggtgccgcccctactgtggagatggatgaggagctgcattatgcttccctcaactttcatgggatgaatccttccaaggacacctccaccgaatactcagaggtcaggacccagtgaggaacccacaagagcatcaggctcagctagaagatccacatcctctacaggtcggggaccaaaggctgattcttggagatttaacaccccacaggcaatgggtttatagacattatgtgagtttcctgctatattaacatcatcttagactttgcaagcagagagtcgtggaatcaaatctgtgctctttcatttgctaagtgtatgatgtcacacaagctccttaaccttccatgtctccattttcttctctgtgaagtaggtataagaagtcctatctcatagggatgctgtgagcattaaataaaggtacacatggaaaacaccagtc

SEQ ID NO: 84 - protein, 237 aa, Homo sapiens
MPLLLLLPLLWADLTHRPKILIPGTLEPGHSKNLTCSVSWACEQGTPPIFSWLSAAPTSLGPRTTHSSVLIITPRPQDHGTNLTCQVKFAGAGVTTERTIQLNVTYVPQNPTTGIFPGDGSGKQETRAGVVHGAIGGAGVTALLALCLCLIFFIVKTHRRKAARTAVGRNDTHPTTGSASPKHQKKSKLHGPTETSSCSGAAPTVEMDEELHYASLNFHGMNPSKDTSTEYSEVRTQ

SEQ ID NO: 85 - DNA, 1108 bp, Homo sapiens
tctgctcacacaggaagccctggaagctgcttcctcagacatgccgctgctgctactgctgcccctgctgtgggcaggggccctggctatggatccaaatttctggctgcaagtgcaggagtcagtgacggtacaggagggtttgtgcgtcctcgtgccctgcactttcttccatcccataccctactacgacaagaactccccagttcatggttactggttccgggaaggagccattatatccagggactctccagtggccacaaacaagctagatcaagaagtacaggaggagactcagggcagattccgcctccttggggatcccagtaggaacaactgctccctgagcatcgtagacgccaggaggagggataatggttcatacttctttcggatggagagaggaagtaccaaatacagttacaaatctccccagctctctgtgcatgtgacagacttgacccacaggcccaaaatcctcatccctggcactctagaacccggccactccaaaaacctgacctgctctgtgtcctgggcctgtgagcagggaacacccccgatcttctcctggttgtcagctgcccccacctccctgggccccaggactactcactcctcggtgctcataatcaccccacggccccaggaccacggcaccaacctgacctgtcaggtgaagttcgctggagctggtgtgactacggagagaaccatccagctcaacgtcacctatgttccacagaacccaacaactggtatctttccaggagatggctcagggaaacaagagaccagagcaggagtggttcatggggccattggaggagctggtgttacagccctgctcgctctttgtctctgcctcatcttcttcatagtgaagacccacaggaggaaagcagccaggacagcagtgggcaggaatgacacccaccctaccacagggtcagcctccccggtacgttgaggccaacagatcaggagatgatggccattgaaaagatagtttcttggccgggcacagtgtttcacacctgcaatcccagcacctttggaggccaaggcgggcggatcacgaggtcaggagattgagactatcctg

SEQ ID NO: 86 - protein, 310 aa, Homo sapiens
MPLLLLLPLLWAGALAMDPNFWLQVQESVTVQEGLCVLVPCTFFHPIPYYDKNSPVHGYWFREGAIISRDSPVATNKLDQEVQEETQGRFRLLGDPSRNNCSLSIVDARRRDNGSYFFRMERGSTKYSYKSPQLSVHVTDLTHRPKILIPGTLEPGHSKNLTCSVSWACEQGTPPIFSWLSAAPTSLGPRTTHSSVLIITPRPQDHGTNLTCQVKFAGAGVTTERTIQLNVTYVPQNPTTGIFPGDGSGKQETRAGVVHGAIGGAGVTALLALCLCLIFFIVKTHRRKAARTAVGRNDTHPTTGSASPVR

SEQ ID NO: 87 - DNA, 653 bp, Homo sapiens
atgaggaacttgaggcaagtcaccagcccctgatcatttcgcctaaaagagcaaggactagagttcctgacctccaggccagtccctgatccctgacctaatgttatcgcggaatgatgatatatgtatctacgggggcctggggctgggcgggctcctgcttctggcagtggtccttctgtccgcctgcctgtgttggctgcatcgaagagtaaagaggctggagaggagctggcaccttctgtcctggtcccaggcccagggctcctcagagcaggaactccactatgcatctctgcagaggctgccagtgcccagcagtgagggacctgacctcaggggcagagacaagagaggcaccaaggaggatccaagagctgactatgcctgcattgctgagaacaaacccacctgagcaccccagacaccttcctcaacccaggcgggtggacagggtccccctgtggtccagccagtaaaaaccatggtccccccacttctgtgtctcagtcctctcagtccatctcgagcctccgttcaaattgatcatcatcaaaacttatgtggctttttgacctttgaatagggaattttttaaattttttaaaaattaaaataaaaaaaacacatggctcacccttccacccaaaaaa

SEQ ID NO: 88 - protein, 104 aa, Homo sapiens
MLSRNDDICIYGGLGLGGLLLLAVVLLSACLCWLHRRVKRLERSWHLLSWSQAQGSSEQELHYASLQRLPVPSSEGPDLRGRDKRGTKEDPRADYACIAENKPT

SEQ ID NO: 89 - DNA, 739 bp, Homo sapiens
acttcagccctagcagcatctgcctgtgggaagcagctctccacaccagccaagggggcccccacactcccgcgctgctctgcggctcagggagcagcccacctgctggatgaggaacttgaggcaagtcaccagcccctgatcatttcgcctaaaagagcaaggactagagttcctgacctccaggccagtccctgatccctgacctaatgttatcgcggaatgatgatatatgtatctacgggggcctggggctgggcgggctcctgcttctggcagtggtccttctgtccgcctgcctgtgttggctgcatcgaagagcaccttctgtcctggtcccaggcccagggctcctcagagcaggaactccactatgcatctctgcagaggctgccagtgcccagcagtgagggacctgacctcaggggcagagacaagagaggcaccaaggaggatccaagagctgactatgcctgcattgctgagaacaaacccacctgagcaccccagacaccttcctcaacccaggcgggtggacagggtccccctgtggtccagccagtaaaaaccatggtccccccacttctgtgtctcagtcctctcagtccatctcgagcctccgttcaaattgatcatcatcaaaacttatgtggctttttgacctttgaatagggaattttttaaattttttaaaaattaaaataaaaaaaacacatggctcacccttccacccaaaaaa

SEQ ID NO: 90 - protein, 66 aa, Homo sapiens
MLSRNDDICIYGGLGLGGLLLLAVVLLSACLCWLHRRAPSVLVPGPGLLRAGTPLCISAEAASAQQ

SEQ ID NO: 91 - DNA, 676 bp, Homo sapiens
gctggggaggaacccaggctgggggagaagttaaagccagaggaggggcaggaatgtctgaggtggcaacacttctcttcagccagacagcactggccagtttggagtctgtccatcctgcaggccacaagctctggatgaggaacttgaggcaagtcaccagcccctgatcatttcgcctaaaagagcaaggactagagttcctgacctccaggccagtccctgatccctgacctaatgttatcgcggaatgatgtaaagaggctggagaggagctgggcccagggctcctcagagcaggaactccactatgcatctctgcagaggctgccagtgcccagcagtgagggacctgacctcaggggcagagacaagagaggcaccaaggaggatccaagagctgactatgcctgcattgctgagaacaaacccacctgagcaccccagacaccttcctcaacccaggcgggtggacagggtccccctgtggtccagccagtaaaaaccatggtccccccacttctgtgtctcagtcctctcagtccatctcgagcctccgttcaaattgatcatcatcaaaacttatgtggctttttgacctttgaatagggaattttttaaattttttaaaaattaaaataaaaaaaacacatggctcacccttccacccaaaaaa

SEQ ID NO: 92 - protein, 66 aa, Homo sapiens
MLSRNDVKRLERSWAQGSSEQELHYASLQRLPVPSSEGPDLRGRDKRGTKEDPRADYACIAENKPT

SEQ ID NO: 93 - DNA, 769 bp, Homo sapiens
gctggggaggaacccaggctgggggagaagttaaagccagaggaggggcaggaatgtctgaggtggcaacacttctcttcagccagacagcactggccagtttggagtctgtccatcctgcaggccacaagctctggatgaggaacttgaggcaagtcaccagcccctgatcatttcgcctaaaagagcaaggactagagttcctgacctccaggccagtccctgatccctgacctaatgttatcgcggaatgatgatatatgtatctacgggggcctggggctgggcgggctcctgcttctggcagtggtccttctgtccgcctgcctgtgttggctgcatcgaagagtaaagaggctggagaggagctgggcccagggctcctcagagcaggaactccactatgcatctctgcagaggctgccagtgcccagcagtgagggacctgacctcaggggcagagacaagagaggcaccaaggaggatccaagagctgactatgcctgcattgctgagaacaaacccacctgagcaccccagacaccttcctcaacccaggcgggtggacagggtccccctgtggtccagccagtaaaaaccatggtccccccacttctgtgtctcagtcctctcagtccatctcgagcctccgttcaaattgatcatcatcaaaacttatgtggctttttgacctttgaatagggaattttttaaattttttaaaaattaaaataaaaaaaacacatggctcacccttccacccaaaaaa

SEQ ID NO: 94 - protein, 97 aa, Homo sapiens
MLSRNDDICIYGGLGLGGLLLLAVVLLSACLCWLHRRVKRLERSWAQGSSEQELHYASLQRLPVPSSEGPDLRGRDKRGTKEDPRADYACIAENKPT

SEQ ID NO: 95 - DNA, 609 bp, Homo sapiens
atgaggaacttgaggcaagtcaccagcccctgatcatttcgcctaaaagagcaaggactagagttcctgacctccaggccagtccctgatccctgacctaatgttatcgcggaatgatgatatatgtatctacgggggcctggggctgggcgggctcctgcttctggcagtggtccttctgtccgcctgcctgtgttggctgcatcgaagaggcccagggctcctcagagcaggaactccactatgcatctctgcagaggctgccagtgcccagcagtgagggacctgacctcaggggcagagacaagagaggcaccaaggaggatccaagagctgactatgcctgcattgctgagaacaaacccacctgagcaccccagacaccttcctcaacccaggcgggtggacagggtccccctgtggtccagccagtaaaaaccatggtccccccacttctgtgtctcagtcctctcagtccatctcgagcctccgttcaaattgatcatcatcaaaacttatgtggctttttgacctttgaatagggaattttttaaattttttaaaaattaaaataaaaaaaacacatggctcacccttccacccaaaaaa

SEQ ID NO: 96 - protein, 59 aa, Homo sapiens
MLSRNDDICIYGGLGLGGLLLLAVVLLSACLCWLHRRGPGLLRAGTPLCISAEAASAQQ

SEQ ID NO: 97 - DNA, 560 bp, Homo sapiens
atgaggaacttgaggcaagtcaccagcccctgatcatttcgcctaaaagagcaaggactagagttcctgacctccaggccagtccctgatccctgacctaatgttatcgcggaatgatgtaaagaggctggagaggagctggcaccttctgtcctggtcccaggcccagggctcctcagagcaggaactccactatgcatctctgcagaggctgccagtgcccagcagtgagggacctgacctcaggggcagagacaagagaggcaccaaggaggatccaagagctgactatgcctgcattgctgagaacaaacccacctgagcaccccagacaccttcctcaacccaggcgggtggacagggtccccctgtggtccagccagtaaaaaccatggtccccccacttctgtgtctcagtcctctcagtccatctcgagcctccgttcaaattgatcatcatcaaaacttatgtggctttttgacctttgaatagggaattttttaaattttttaaaaattaaaataaaaaaaacacatggctcacccttccacccaaaaaa

SEQ ID NO: 98 - protein, 73 aa, Homo sapiens
MLSRNDVKRLERSWHLLSWSQAQGSSEQELHYASLQRLPVPSSEGPDLRGRDKRGTKEDPRADYACIAENKPT

SEQ ID NO: 99 - DNA, 1199 bp, Homo sapiens
ggccaagccaaagggctctcacactaagtgaagcttctccattctgtaagctttccgggaacatccaaggcaagactggcacccagcacagcagtgactgaccacataccccactctccaggacccatggagtccttcagctcaaagagcctggcactgcaagcagagaagaagctactgagtaagatggcgggtcgctctgtggctcatctcttcatagatgagacaagcagtgaggtgctagatgagctctaccgtgtgtccaaggagtacacgcacagccggccccaggcccagcgcgtgatcaaggacctgatcaaagtggccatcaaggtggctgtgctgcaccgcaatggctcctttggccccagtgagctggccctggctacccgctttcgccagaagctgcggcagggtgccatgacggcacttagctttggtgaggtagacttcaccttcgaggctgctgttctggctggcctgctgaccgagtgccgggatgtgctgctagagttggtggaacaccacctcacgcccaagtcacatggccgcatccgccacgtgtttgatcacttctctgacccaggtctgctcacggccctctatgggcctgacttcactcagcaccttggcaagatctgtgacggactcaggaagctgctagacgaagggaagctctgagagccctgagcctagcacattccaccttgacaaaatggttgactgagaaaacacagataatgggcttcctaaccctgctcacctggcactaacacttttcaatcttcaggcttcattccttcccaagagtgcttttgactctgagaccagcccacccccaaacagctagtggagaaggagcaatgctgaggggtgaggcctctctcccactccagccccaggacaggaaacagaactgcctgaaaaaggtgaagtgaaacttggatctctatttctcccataagggacttctgaaacagggaagccccctcccatgtgaaccaaggaaaggaggcacagcccagagaacccctttggggatactaaagacagaagaggggaaggtggcccttagagacagagcttggacagatgccagaggctctgttccagagtgcaggaagaaggggctagggcaggggagattctcataggggaaataaaactactaaaatatgaaaaaaaaaaaaaaaaaaaaa

SEQ ID NO: 100 - protein, 184 aa, Homo sapiens
MESFSSKSLALQAEKKLLSKMAGRSVAHLFIDETSSEVLDELYRVSKEYTHSRPQAQRVIKDLIKVAIKVAVLHRNGSFGPSELALATRFRQKLRQGAMTALSFGEVDFTFEAAVLAGLLTECRDVLLELVEHHLTPKSHGRIRHVFDHFSDPGLLTALYGPDFTQHLGKICDGLRKLLDEGKL

SEQ ID NO: 101 - DNA, 1122 bp, Mus musculus
gctctcagaaacatccaaggccagactggcacccagcacacggcagccggttgcctcttccagtgactgatcacacaccgaccgcaagcaccatggagtccttcagctcaaagagtctggcactacaagcggagaagaagctgctgagtaaaatggctggtcggtccgtggcgcatctctttatcgacgagaccagcagcgaggtgctagacgagctttaccgcgtgtccaaagaatacacgcacagccggcccaaggcacagcgggtgatcaaagacctcatcaaggtagcggttaaagtggctgtgctgcaccgcagtggctgctttggccctggggagctggctctggctacacgatttcgtcagaagctacggcagggcgccatgaccgcacttagcttcggtgaggtggacttcacctttgaggctgccgtgctagcaggtctgctcgtcgagtgccgggacattctgctggagctggtggagcaccacctcacacccaagtcacatgaccgcatcaggcacgtgtttgatcactactctgaccccgacctgctggctgccctctatgggcctgacttcactcagcaccttggcaagatctgtgatgggctccggaagctgctggacgagggcaagctctgaagctccggagctcagcacactggactttggcaaaatgactgactgggaaatgacacatcgggctctctaaccctgcaccaatgcttctcgatcccctggcttcactctctcccaagagtgctatagacactgaggccacccccacccccaaactactgctggggcaaagcaaggctgaactgagtgaggcggctctcgctcccatccagttccagtaaaggaaacagctgactgaagaagaagtgaaactcaggtccgcttctcccgggagggctgcccagaaccgggggatcctcctcctccacaaacccgaggaaggggacactaaaggccacacgcaggaaggtggtcattagagacctcctggatctagagttggaggcagcactaggacacatacagacgctgtgttccagagcttctagaaggagctgggggaagggaggcacaggggaaataaaaccactaaagcatg

SEQ ID NO: 102 - protein, 184 aa, Mus musculus
MESFSSKSLALQAEKKLLSKMAGRSVAHLFIDETSSEVLDELYRVSKEYTHSRPKAQRVIKDLIKVAVKVAVLHRSGCFGPGELALATRFRQKLRQGAMTALSFGEVDFTFEAAVLAGLLVECRDILLELVEHHLTPKSHDRIRHVFDHYSDPDLLAALYGPDFTQHLGKICDGLRKLLDEGKL

SEQ ID NO: 103 - DNA, 1426 bp, Homo sapiens
gactatctcccagcggcaggcccttcgataaaatcaggaacttgtgctggccctgcaatgtcaagggagggggctcacccagggctcctgtagctcagggggcaggcctgagccctgcacccgccccacgaccgtccagcccctgacggggcaccccatcctgaggggctctgcattggcccccaccgaggcaggggatctgaccgactcggagcccggctggatgttacaggcgtgcaaaatggaagggtttcccctcgtcccccctcagccatcagaagacctggtgccctatgacacggatctataccaacgccaaacgcacgagtattacccctatctcagcagtgatggggagagccatagcgaccattactgggacttccacccccaccacgtgcacagcgagttcgagagcttcgccgagaacaacttcacggagctccagagcgtgcagcccccgcagctgcagcagctctaccgccacatggagctggagcagatgcacgtcctcgatacccccatggtgccaccccatcccagtcttggccaccaggtctcctacctgccccggatgtgcctccagtacccatccctgtccccagcccagcccagctcagatgaggaggagggcgagcggcagagccccccactggaggtgtctgacggcgaggcggatggcctggagcccgggcctgggctcctgcctggggagacaggcagcaagaagaagatccgcctgtaccagttcctgttggacctgctccgcagcggcgacatgaaggacagcatctggtgggtggacaaggacaagggcaccttccagttctcgtccaagcacaaggaggcgctggcgcaccgctggggcatccagaagggcaaccgcaagaagatgacctaccagaagatggcgcgcgcgctgcgcaactacggcaagacgggcgaggtcaagaaggtgaagaagaagctcacctaccagttcagcggcgaagtgctgggccgcgggggcctggccgagcggcgccacccgccccactgagcccgcagcccccgccgggccccgccaggcctccccgctggccatagcattaagccctcgcccggcccggacacagggaggacgctcccggggcccagaggcaggactgtggcgggccgggcctcgcctcacccgccccctccccccactccaggccccctccacatcccgcttcgcctccctccaggactccaccccggctcccggacgccagctgggcgtcagaccccaccggggcaaccttgcagaggacgacccggggtactgccttgggagtctcaagtccgtatgtaaatcagatctcccctctcacccctcccacccattaacctcctcccaaaaaacaagtaaagttattctcaatccatcaaaaaaaaaaaaaaaaaa

SEQ ID NO: 104 - protein, 271 aa, Homo sapiens
MLQACKMEGFPLVPPQPSEDLVPYDTDLYQRQTHEYYPYLSSDGESHSDHYWDFHPHHVHSEFESFAENNFTELQSVQPPQLQQLYRHMELEQMHVLDTPMVPPHPSLGHQVSYLPRMCLQYPSLSPAQPSSDEEEGERQSPPLEVSDGEADGLEPGPGLLPGETGSKKKIRLYQFLLDLLRSGDMKDSIWWVDKDKGTFQFSSKHKEALAHRWGIQKGNRKKMTYQKMARALRNYGKTGEVKKVKKKLTYQFSGEVLGRGGLAERRHPPH

SEQ ID NO: 105 - DNA, 1423 bp, Homo sapiens
gactatctcccagcggcaggcccttcgataaaatcaggaacttgtgctggccctgcaatgtcaagggagggggctcacccagggctcctgtagctcagggggcaggcctgagccctgcacccgccccacgaccgtccagcccctgacggggcaccccatcctgaggggctctgcattggcccccaccgaggcaggggatctgaccgactcggagcccggctggatgttacaggcgtgcaaaatggaagggtttcccctcgtcccccctccatcagaagacctggtgccctatgacacggatctataccaacgccaaacgcacgagtattacccctatctcagcagtgatggggagagccatagcgaccattactgggacttccacccccaccacgtgcacagcgagttcgagagcttcgccgagaacaacttcacggagctccagagcgtgcagcccccgcagctgcagcagctctaccgccacatggagctggagcagatgcacgtcctcgatacccccatggtgccaccccatcccagtcttggccaccaggtctcctacctgccccggatgtgcctccagtacccatccctgtccccagcccagcccagctcagatgaggaggagggcgagcggcagagccccccactggaggtgtctgacggcgaggcggatggcctggagcccgggcctgggctcctgcctggggagacaggcagcaagaagaagatccgcctgtaccagttcctgttggacctgctccgcagcggcgacatgaaggacagcatctggtgggtggacaaggacaagggcaccttccagttctcgtccaagcacaaggaggcgctggcgcaccgctggggcatccagaagggcaaccgcaagaagatgacctaccagaagatggcgcgcgcgctgcgcaactacggcaagacgggcgaggtcaagaaggtgaagaagaagctcacctaccagttcagcggcgaagtgctgggccgcgggggcctggccgagcggcgccacccgccccactgagcccgcagcccccgccgggccccgccaggcctccccgctggccatagcattaagccctcgcccggcccggacacagggaggacgctcccggggcccagaggcaggactgtggcgggccgggcctcgcctcacccgccccctccccccactccaggccccctccacatcccgcttcgcctccctccaggactccaccccggctcccggacgccagctgggcgtcagaccccaccggggcaaccttgcagaggacgacccggggtactgccttgggagtctcaagtccgtatgtaaatcagatctcccctctcacccctcccacccattaacctcctcccaaaaaacaagtaaagttattctcaatccatcaaaaaaaaaaaaaaaaaa

SEQ ID NO: 106 - protein, 270 aa, Homo sapiens
MLQACKMEGFPLVPPPSEDLVPYDTDLYQRQTHEYYPYLSSDGESHSDHYWDFHPHHVHSEFESFAENNFTELQSVQPPQLQQLYRHMELEQMHVLDTPMVPPHPSLGHQVSYLPRMCLQYPSLSPAQPSSDEEEGERQSPPLEVSDGEADGLEPGPGLLPGETGSKKKIRLYQFLLDLLRSGDMKDSIWWVDKDKGTFQFSSKHKEALAHRWGIQKGNRKKMTYQKMARALRNYGKTGEVKKVKKKLTYQFSGEVLGRGGLAERRHPPH

SEQ ID NO: 107 - DNA, 1473 bp, Mus musculus
aagagatttatgcaaacgggctggggcggtgatgtcaccccaaggggactatctcccagtggcaggcccttcgataaaatcaggaacttgtgctggccctgcaatgtcaagggagggggctcacccagggctcctgtagctcagggggcaggcctgagccctgcgtctgacccacgaccgtccagtcccccgacggggcacctggtcctgagggggatccgccttgatccccaccgaagcaggggatctgaccaacctggagctcagctggatgttacaggcgtgcaaaatggaagggttttccctcaccgcccctccatcggatgacttggttacttacgattcagagctataccaacgtccaatgcatgactactactccttcgtgggcagcgatggagaaagccatagcgatcactactgggatttctccgcacaccatgtccacaacaacgagtttgagaacttccctgagaaccacttcacagagctgcagagtgtgcagcccccgcagctacagcagctctatcgccacatggagctggaacagatgcacgtcctcgatactcccatggtgccaccccacaccggcctcagtcaccaggtttcctacatgccccggatgtgcttcccttatcaaaccttgtccccagcccaccagcagagctcagatgaggaggagggtgagaggcagagccctcccctggaggtgtctgatggagaagctgatggcttggagcctgggccaggtcttctgcacggggagacaggcagcaagaaaaagattcgcctgtaccagttcctgctggacctgctgcgcagcggcgacatgaaggacagcatctggtgggtggacaaggacaaaggtaccttccagttctcgtccaagcacaaggaggcgctggcgcaccgctggggcatccagaagggcaaccgcaagaagatgacctaccagaagatggcgcgcgcgctgcgcaactacggcaagacaggcgaggtgaagaaagtcaagaagaagctcacctaccagttcagcggcgaggtgctgggccgtgggggcctggccgagcggcgcctcccgccccactgatcgcccgcagagaccgccaggctcctggaccccgccggccatagcattaacccgtcgcccggcccggacacagggaggacattcccagggccgaggcaggactgggggcccggcctcgccctcccatgcccggcctggcccgccccacccgctttgcctcccaccaggactctagcccgctccaagggccgcctgggcctcggacctcaaccgagggtcagcctggcttagtggccacggtgcttccttgggagtctggcgctggcacctttttgtatattgaatgctttttaaaaagctcttcctccccaccccctcattagtcactaaagacaagtaaaattattgacagctattctcccagaaaaaaaaaaaaaaaaaaa

SEQ ID NO: 108 - protein, 272 aa, Mus musculus
MLQACKMEGFSLTAPPSDDLVTYDSELYQRPMHDYYSFVGSDGESHSDHYWDFSAHHVHNNEFENFPENHFTELQSVQPPQLQQLYRHMELEQMHVLDTPMVPPHTGLSHQVSYMPRMCFPYQTLSPAHQQSSDEEEGERQSPPLEVSDGEADGLEPGPGLLHGETGSKKKIRLYQFLLDLLRSGDMKDSIWWVDKDKGTFQFSSKHKEALAHRWGIQKGNRKKMTYQKMARALRNYGKTGEVKKVKKKLTYQFSGEVLGRGGLAERRLPPH

SEQ ID NO: 109 - DNA, 2940 bp, Homo sapiens
atttggttgaaagaaaacccacaatccagtgtcaagaaagaagtcaacttttcttcccctacttccctgcatttctcctctgtgctcactgccacacacagctcaacctggacagcacagccagaggcgagatgcttctctgctgatctgagtctgcctgcagcatggacctgggtcttccctgaagcatctccagggctggagggacgactgccatgcaccgagggctcatccatccgcagagcagggcagtgggaggagacgccatgacccccatcgtcacagtcctgatctgtctcgggctgagtctgggccccaggacccgcgtgcagacagggaccatccccaagcccaccctgtgggctgagccagactctgtgatcacccaggggagtcccgtcaccctcagttgtcaggggagccttgaagcccaggagtaccgtctatatagggagaaaaaatcagcatcttggattacacggatacgaccagagcttgtgaagaacggccagttccacatcccatccatcacctgggaacacacagggcgatatggctgtcagtattacagccgcgctcggtggtctgagctcagtgaccccctggtgctggtgatgacaggagcctacccaaaacccaccctctcagcccagcccagccctgtggtgacctcaggaggaagggtgaccctccagtgtgagtcacaggtggcatttggcggcttcattctgtgtaaggaaggagaagatgaacacccacaatgcctgaactcccagccccatgcccgtgggtcgtcccgcgccatcttctccgtgggccccgtgagcccgaatcgcaggtggtcgcacaggtgctatggttatgacttgaactctccctatgtgtggtcttcacccagtgatctcctggagctcctggtcccaggtgtttctaagaagccatcactctcagtgcagccgggtcctgtcatggcccctggggaaagcctgaccctccagtgtgtctctgatgtcggctatgacagatttgttctgtacaaggagggggaacgtgaccttcgccagctccctggccggcagccccaggctgggctctcccaggccaacttcaccctgggccctgtgagccgctcctacgggggccagtacagatgctacggtgcacacaacctctcctctgagtgctcggcccccagcgaccccctggacatcctgatcacaggacagatccgtggcacacccttcatctcagtgcagccaggccccacagtggcctcaggagagaacgtgaccctgctgtgtcagtcatggcggcagttccacactttccttctgaccaaggcgggagcagctgatgccccactccgtctaagatcaatacacgaatatcctaagtaccaggctgaattccccatgagtcctgtgacctcagcccacgcggggacctacaggtgctacggctcactcaactccgacccctacctgctgtctcaccccagtgagcccctggagctcgtggtctcaggaccctccatgggttccagccccccacccaccggtcccatctccacacctgcaggccctgaggaccagcccctcacccccactgggtcggatccccaaagtggtctgggaaggcacctgggggttgtgatcggcatcttggtggccgtcgtcctactgctcctcctcctcctcctcctcttcctcatcctccgacatcgacgtcagggcaaacactggacatcgacccagagaaaggctgatttccaacatcctgcaggggctgtggggccagagcccacagacagaggcctgcagtggaggtccagcccagctgccgacgcccaggaagaaaacctctatgctgccgtgaaggacacacagcctgaagatggggtggagatggacactcgggctgctgcatctgaagccccccaggatgtgacctacgcccagctgcacagcttgaccctcagacggaaggcaactgagcctcctccatcccaggaaagggaacctccagctgagcccagcatctacgccaccctggccatccactagcccggagggtacgcagactccacactcagtagaaggagactcaggactgctgaaggcacgggagctgcccccagtggacaccaatgaaccccagtcagcctggacccctaacaaagaccatgaggagatgctgggaactttgggactcacttgattctgcagtcgaaataactaatatccctacattttttaattaaagcaacagacttctcaataatcaatgagttaaccgagaaaactaaaatcagaagtaagaatgtgctttaaactgaatcacaatataaatattacacatcacacaatgaaattgaaaaagtacaaaccacaaatgaaaaaagtagaaacgaaaaaaaaaaactaggaaatgaatgacgttggctttcgtataaggaatttagaaaaagaataaccaattattccaaatgaaggtgtaagaaagggaataagaagaagaagagttgctcatgaggaaaaaccaaaacttgaaaattcaacaaagccaatgaagctcattcttgaaaatattaattacagtcataaatcctaactacattgagcaagagaaagaaagagcaggcacgcatttccatatgggagtgagccagcagacagcccagcagatcctacacacattttcacaaactaaccccagaacaggctgcaaacctataccaatatactagaaaatgcagattaaatggatgaaatattcaaaactggagtttacataatgaacgtaagagtaatcagagaatctgactcattttaaatgtgtgtgtatgtgtgtgtatatatatgtgtgtgtgtgtgtgtgtgtgtgtgtgtgaaaaacattgactgtaataaaaatgttcccatcgtaaaaaaaaaaaaaaaa

SEQ ID NO: 110 - protein, 598 aa, Homo sapiens
MTPIVTVLICLGLSLGPRTRVQTGTIPKPTLWAEPDSVITQGSPVTLSCQGSLEAQEYRLYREKKSASWITRIRPELVKNGQFHIPSITWEHTGRYGCQYYSRARWSELSDPLVLVMTGAYPKPTLSAQPSPVVTSGGRVTLQCESQVAFGGFILCKEGEDEHPQCLNSQPHARGSSRAIFSVGPVSPNRRWSHRCYGYDLNSPYVWSSPSDLLELLVPGVSKKPSLSVQPGPVMAPGESLTLQCVSDVGYDRFVLYKEGERDLRQLPGRQPQAGLSQANFTLGPVSRSYGGQYRCYGAHNLSSECSAPSDPLDILITGQIRGTPFISVQPGPTVASGENVTLLCQSWRQFHTFLLTKAGAADAPLRLRSIHEYPKYQAEFPMSPVTSAHAGTYRCYGSLNSDPYLLSHPSEPLELVVSGPSMGSSPPPTGPISTPAGPEDQPLTPTGSDPQSGLGRHLGVVIGILVAVVLLLLLLLLLFLILRHRRQGKHWTSTQRKADFQHPAGAVGPEPTDRGLQWRSSPAADAQEENLYAAVKDTQPEDGVEMDTRAAASEAPQDVTYAQLHSLTLRRKATEPPPSQEREPPAEPSIYATLAIH

SEQ ID NO: 111 - DNA, 2937 bp, Homo sapiens
atttggttgaaagaaaacccacaatccagtgtcaagaaagaagtcaacttttcttcccctacttccctgcatttctcctctgtgctcactgccacacacagctcaacctggacagcacagccagaggcgagatgcttctctgctgatctgagtctgcctgcagcatggacctgggtcttccctgaagcatctccagggctggagggacgactgccatgcaccgagggctcatccatccgcagagcagggcagtgggaggagacgccatgacccccatcgtcacagtcctgatctgtctcgggctgagtctgggccccaggacccgcgtgcagacagggaccatccccaagcccaccctgtgggctgagccagactctgtgatcacccaggggagtcccgtcaccctcagttgtcaggggagccttgaagcccaggagtaccgtctatatagggagaaaaaatcagcatcttggattacacggatacgaccagagcttgtgaagaacggccagttccacatcccatccatcacctgggaacacacagggcgatatggctgtcagtattacagccgcgctcggtggtctgagctcagtgaccccctggtgctggtgatgacaggagcctacccaaaacccaccctctcagcccagcccagccctgtggtgacctcaggaggaagggtgaccctccagtgtgagtcacaggtggcatttggcggcttcattctgtgtaaggaaggagaagatgaacacccacaatgcctgaactcccagccccatgcccgtgggtcgtcccgcgccatcttctccgtgggccccgtgagcccgaatcgcaggtggtcgcacaggtgctatggttatgacttgaactctccctatgtgtggtcttcacccagtgatctcctggagctcctggtcccaggtgtttctaagaagccatcactctcagtgcagccgggtcctgtcatggcccctggggaaagcctgaccctccagtgtgtctctgatgtcggctatgacagatttgttctgtacaaggagggggaacgtgaccttcgccagctccctggccggcagccccaggctgggctctcccaggccaacttcaccctgggccctgtgagccgctcctacgggggccagtacagatgctacggtgcacacaacctctcctctgagtgctcggcccccagcgaccccctggacatcctgatcacaggacagatccgtggcacacccttcatctcagtgcagccaggccccacagtggcctcaggagagaacgtgaccctgctgtgtcagtcatggcggcagttccacactttccttctgaccaaggcgggagcagctgatgccccactccgtctaagatcaatacacgaatatcctaagtaccaggctgaattccccatgagtcctgtgacctcagcccacgcggggacctacaggtgctacggctcactcaactccgacccctacctgctgtctcaccccagtgagcccctggagctcgtggtctcaggaccctccatgggttccagccccccacccaccggtcccatctccacacctggccctgaggaccagcccctcacccccactgggtcggatccccaaagtggtctgggaaggcacctgggggttgtgatcggcatcttggtggccgtcgtcctactgctcctcctcctcctcctcctcttcctcatcctccgacatcgacgtcagggcaaacactggacatcgacccagagaaaggctgatttccaacatcctgcaggggctgtggggccagagcccacagacagaggcctgcagtggaggtccagcccagctgccgacgcccaggaagaaaacctctatgctgccgtgaaggacacacagcctgaagatggggtggagatggacactcgggctgctgcatctgaagccccccaggatgtgacctacgcccagctgcacagcttgaccctcagacggaaggcaactgagcctcctccatcccaggaaagggaacctccagctgagcccagcatctacgccaccctggccatccactagcccggagggtacgcagactccacactcagtagaaggagactcaggactgctgaaggcacgggagctgcccccagtggacaccaatgaaccccagtcagcctggacccctaacaaagaccatgaggagatgctgggaactttgggactcacttgattctgcagtcgaaataactaatatccctacattttttaattaaagcaacagacttctcaataatcaatgagttaaccgagaaaactaaaatcagaagtaagaatgtgctttaaactgaatcacaatataaatattacacatcacacaatgaaattgaaaaagtacaaaccacaaatgaaaaaagtagaaacgaaaaaaaaaaactaggaaatgaatgacgttggctttcgtataaggaatttagaaaaagaataaccaattattccaaatgaaggtgtaagaaagggaataagaagaagaagagttgctcatgaggaaaaaccaaaacttgaaaattcaacaaagccaatgaagctcattcttgaaaatattaattacagtcataaatcctaactacattgagcaagagaaagaaagagcaggcacgcatttccatatgggagtgagccagcagacagcccagcagatcctacacacattttcacaaactaaccccagaacaggctgcaaacctataccaatatactagaaaatgcagattaaatggatgaaatattcaaaactggagtttacataatgaacgtaagagtaatcagagaatctgactcattttaaatgtgtgtgtatgtgtgtgtatatatatgtgtgtgtgtgtgtgtgtgtgtgtgtgtgaaaaacattgactgtaataaaaatgttcccatcgtaaaaaaaaaaaaaaaa

SEQ ID NO: 112 - protein, 597 aa, Homo sapiens
MTPIVTVLICLGLSLGPRTRVQTGTIPKPTLWAEPDSVITQGSPVTLSCQGSLEAQEYRLYREKKSASWITRIRPELVKNGQFHIPSITWEHTGRYGCQYYSRARWSELSDPLVLVMTGAYPKPTLSAQPSPVVTSGGRVTLQCESQVAFGGFILCKEGEDEHPQCLNSQPHARGSSRAIFSVGPVSPNRRWSHRCYGYDLNSPYVWSSPSDLLELLVPGVSKKPSLSVQPGPVMAPGESLTLQCVSDVGYDRFVLYKEGERDLRQLPGRQPQAGLSQANFTLGPVSRSYGGQYRCYGAHNLSSECSAPSDPLDILITGQIRGTPFISVQPGPTVASGENVTLLCQSWRQFHTFLLTKAGAADAPLRLRSIHEYPKYQAEFPMSPVTSAHAGTYRCYGSLNSDPYLLSHPSEPLELVVSGPSMGSSPPPTGPISTPGPEDQPLTPTGSDPQSGLGRHLGVVIGILVAVVLLLLLLLLLFLILRHRRQGKHWTSTQRKADFQHPAGAVGPEPTDRGLQWRSSPAADAQEENLYAAVKDTQPEDGVEMDTRAAASEAPQDVTYAQLHSLTLRRKATEPPPSQEREPPAEPSIYATLAIH

SEQ ID NO: 113 - DNA, 2799 bp, Homo sapiens
ggggaagccactgctaccctcatcaggaagggcagacacaagaagcaccagttctatttgctgctacatcccggctctcgcaccgagggctcatccatccgcagagcagggcagtgggaggagacgccatgacccccatcgtcacagtcctgatctgtctcgggctgagtctgggccccaggacccgcgtgcagacagggaccatccccaagcccaccctgtgggctgagccagactctgtgatcacccaggggagtcccgtcaccctcagttgtcaggggagccttgaagcccaggagtaccgtctatatagggagaaaaaatcagcatcttggattacacggatacgaccagagcttgtgaagaacggccagttccacatcccatccatcacctgggaacacacagggcgatatggctgtcagtattacagccgcgctcggtggtctgagctcagtgaccccctggtgctggtgatgacaggagcctacccaaaacccaccctctcagcccagcccagccctgtggtgacctcaggaggaagggtgaccctccagtgtgagtcacaggtggcatttggcggcttcattctgtgtaaggaaggagaagatgaacacccacaatgcctgaactcccagccccatgcccgtgggtcgtcccgcgccatcttctccgtgggccccgtgagcccgaatcgcaggtggtcgcacaggtgctatggttatgacttgaactctccctatgtgtggtcttcacccagtgatctcctggagctcctggtcccaggtgtttctaagaagccatcactctcagtgcagccgggtcctgtcatggcccctggggaaagcctgaccctccagtgtgtctctgatgtcggctatgacagatttgttctgtacaaggagggggaacgtgaccttcgccagctccctggccggcagccccaggctgggctctcccaggccaacttcaccctgggccctgtgagccgctcctacgggggccagtacagatgctacggtgcacacaacctctcctctgagtgctcggcccccagcgaccccctggacatcctgatcacaggacagatccgtggcacacccttcatctcagtgcagccaggccccacagtggcctcaggagagaacgtgaccctgctgtgtcagtcatggcggcagttccacactttccttctgaccaaggcgggagcagctgatgccccactccgtctaagatcaatacacgaatatcctaagtaccaggctgaattccccatgagtcctgtgacctcagcccacgcggggacctacaggtgctacggctcactcaactccgacccctacctgctgtctcaccccagtgagcccctggagctcgtggtctcaggaccctccatgggttccagccccccacccaccggtcccatctccacacctggccctgaggaccagcccctcacccccactgggtcggatccccaaagtggtctgggaaggcacctgggggttgtgatcggcatcttggtggccgtcgtcctactgctcctcctcctcctcctcctcttcctcatcctccgacatcgacgtcagggcaaacactggacatcgacccagagaaaggctgatttccaacatcctgcaggggctgtggggccagagcccacagacagaggcctgcagtggaggtccagcccagctgccgacgcccaggaagaaaacctctatgctgccgtgaaggacacacagcctgaagatggggtggagatggacactcgggctgctgcatctgaagccccccaggatgtgacctacgcccagctgcacagcttgaccctcagacggaaggcaactgagcctcctccatcccaggaaagggaacctccagctgagcccagcatctacgccaccctggccatccactagcccggagggtacgcagactccacactcagtagaaggagactcaggactgctgaaggcacgggagctgcccccagtggacaccaatgaaccccagtcagcctggacccctaacaaagaccatgaggagatgctgggaactttgggactcacttgattctgcagtcgaaataactaatatccctacattttttaattaaagcaacagacttctcaataatcaatgagttaaccgagaaaactaaaatcagaagtaagaatgtgctttaaactgaatcacaatataaatattacacatcacacaatgaaattgaaaaagtacaaaccacaaatgaaaaaagtagaaacgaaaaaaaaaaactaggaaatgaatgacgttggctttcgtataaggaatttagaaaaagaataaccaattattccaaatgaaggtgtaagaaagggaataagaagaagaagagttgctcatgaggaaaaaccaaaacttgaaaattcaacaaagccaatgaagctcattcttgaaaatattaattacagtcataaatcctaactacattgagcaagagaaagaaagagcaggcacgcatttccatatgggagtgagccagcagacagcccagcagatcctacacacattttcacaaactaaccccagaacaggctgcaaacctataccaatatactagaaaatgcagattaaatggatgaaatattcaaaactggagtttacataatgaacgtaagagtaatcagagaatctgactcattttaaatgtgtgtgtatgtgtgtgtatatatatgtgtgtgtgtgtgtgtgtgtgtgtgtgtgaaaaacattgactgtaataaaaatgttcccatcgtaaaaaaaaaaaaaaaa

SEQ ID NO: 114 - DNA, 2789 bp, Homo sapiens
atttggttgaaagaaaacccacaatccagtgtcaagaaagaagtcaacttttcttcccctacttccctgcatttctcctctgtgctcactgccacacacagctcaacctggacagcacagccagaggcgagatgcttctctgctgatctgagtctgcctgcagcatggacctgggtcttccctgaagcatctccagggctggagggacgactgccatgcaccgagggctcatccatccgcagagcagggcagtgggaggagacgccatgacccccatcgtcacagtcctgatctgtctcgggagaaaaaatcagcatcttggattacacggatacgaccagagcttgtgaagaacggccagttccacatcccatccatcacctgggaacacacagggcgatatggctgtcagtattacagccgcgctcggtggtctgagctcagtgaccccctggtgctggtgatgacaggagcctacccaaaacccaccctctcagcccagcccagccctgtggtgacctcaggaggaagggtgaccctccagtgtgagtcacaggtggcatttggcggcttcattctgtgtaaggaaggagaagatgaacacccacaatgcctgaactcccagccccatgcccgtgggtcgtcccgcgccatcttctccgtgggccccgtgagcccgaatcgcaggtggtcgcacaggtgctatggttatgacttgaactctccctatgtgtggtcttcacccagtgatctcctggagctcctggtcccaggtgtttctaagaagccatcactctcagtgcagccgggtcctgtcatggcccctggggaaagcctgaccctccagtgtgtctctgatgtcggctatgacagatttgttctgtacaaggagggggaacgtgaccttcgccagctccctggccggcagccccaggctgggctctcccaggccaacttcaccctgggccctgtgagccgctcctacgggggccagtacagatgctacggtgcacacaacctctcctctgagtgctcggcccccagcgaccccctggacatcctgatcacaggacagatccgtggcacacccttcatctcagtgcagccaggccccacagtggcctcaggagagaacgtgaccctgctgtgtcagtcatggcggcagttccacactttccttctgaccaaggcgggagcagctgatgccccactccgtctaagatcaatacacgaatatcctaagtaccaggctgaattccccatgagtcctgtgacctcagcccacgcggggacctacaggtgctacggctcactcaactccgacccctacctgctgtctcaccccagtgagcccctggagctcgtggtctcaggaccctccatgggttccagccccccacccaccggtcccatctccacacctgcaggccctgaggaccagcccctcacccccactgggtcggatccccaaagtggtctgggaaggcacctgggggttgtgatcggcatcttggtggccgtcgtcctactgctcctcctcctcctcctcctcttcctcatcctccgacatcgacgtcagggcaaacactggacatcgacccagagaaaggctgatttccaacatcctgcaggggctgtggggccagagcccacagacagaggcctgcagtggaggtccagcccagctgccgacgcccaggaagaaaacctctatgctgccgtgaaggacacacagcctgaagatggggtggagatggacactcgggctgctgcatctgaagccccccaggatgtgacctacgcccagctgcacagcttgaccctcagacggaaggcaactgagcctcctccatcccaggaaagggaacctccagctgagcccagcatctacgccaccctggccatccactagcccggagggtacgcagactccacactcagtagaaggagactcaggactgctgaaggcacgggagctgcccccagtggacaccaatgaaccccagtcagcctggacccctaacaaagaccatgaggagatgctgggaactttgggactcacttgattctgcagtcgaaataactaatatccctacattttttaattaaagcaacagacttctcaataatcaatgagttaaccgagaaaactaaaatcagaagtaagaatgtgctttaaactgaatcacaatataaatattacacatcacacaatgaaattgaaaaagtacaaaccacaaatgaaaaaagtagaaacgaaaaaaaaaaactaggaaatgaatgacgttggctttcgtataaggaatttagaaaaagaataaccaattattccaaatgaaggtgtaagaaagggaataagaagaagaagagttgctcatgaggaaaaaccaaaacttgaaaattcaacaaagccaatgaagctcattcttgaaaatattaattacagtcataaatcctaactacattgagcaagagaaagaaagagcaggcacgcatttccatatgggagtgagccagcagacagcccagcagatcctacacacattttcacaaactaaccccagaacaggctgcaaacctataccaatatactagaaaatgcagattaaatggatgaaatattcaaaactggagtttacataatgaacgtaagagtaatcagagaatctgactcattttaaatgtgtgtgtatgtgtgtgtatatatatgtgtgtgtgtgtgtgtgtgtgtgtgtgtgaaaaacattgactgtaataaaaatgttcccatcgtaaaaaaaaaaaaaaaa

SEQ ID NO: 115 - protein, 482 aa, Homo sapiens
MTGAYPKPTLSAQPSPVVTSGGRVTLQCESQVAFGGFILCKEGEDEHPQCLNSQPHARGSSRAIFSVGPVSPNRRWSHRCYGYDLNSPYVWSSPSDLLELLVPGVSKKPSLSVQPGPVMAPGESLTLQCVSDVGYDRFVLYKEGERDLRQLPGRQPQAGLSQANFTLGPVSRSYGGQYRCYGAHNLSSECSAPSDPLDILITGQIRGTPFISVQPGPTVASGENVTLLCQSWRQFHTFLLTKAGAADAPLRLRSIHEYPKYQAEFPMSPVTSAHAGTYRCYGSLNSDPYLLSHPSEPLELVVSGPSMGSSPPPTGPISTPAGPEDQPLTPTGSDPQSGLGRHLGVVIGILVAVVLLLLLLLLLFLILRHRRQGKHWTSTQRKADFQHPAGAVGPEPTDRGLQWRSSPAADAQEENLYAAVKDTQPEDGVEMDTRAAASEAPQDVTYAQLHSLTLRRKATEPPPSQEREPPAEPSIYATLAIH

SEQ ID NO: 116 - DNA, 2646 bp, Homo sapiens
caccgagggctcatccatccgcagagcagggcagtgggaggagacgccatgacccccatcgtcacagtcctgatctgtctcgggctgagtctgggccccaggacccgcgtgcagacagggaccatccccaagcccaccctgtgggctgagccagactctgtgatcacccaggggagtcccgtcaccctcagttgtcaggggagccttgaagcccaggagtaccgtctatatagggagaaaaaatcagcatcttggattacacggatacgaccagagcttgtgaagaacggccagttccacatcccatccatcacctgggaacacacagggcgatatggctgtcagtattacagccgcgctcggtggtctgagctcagtgaccccctggtgctggtgatgacaggagcctacccaaaacccaccctctcagcccagcccagccctgtggtgacctcaggaggaagggtgaccctccagtgtgagtcacaggtggcatttggcggcttcattctgtgtaaggaaggagaagatgaacacccacaatgcctgaactcccagccccatgcccgtgggtcgtcccgcgccatcttctccgtgggccccgtgagcccgaatcgcaggtggtcgcacaggtgctatggttatgacttgaactctccctatgtgtggtcttcacccagtgatctcctggagctcctggtcccaggtgtttctaagaagccatcactctcagtgcagccgggtcctgtcatggcccctggggaaagcctgaccctccagtgtgtctctgatgtcggctatgacagatttgttctgtacaaggagggggaacgtgaccttcgccagctccctggccggcagccccaggctgggctctcccaggccaacttcaccctgggccctgtgagccgctcctacgggggccagtacagatgctacggtgcacacaacctctcctctgagtgctcggcccccagcgaccccctggacatcctgatcacaggacagatccgtggcacacccttcatctcagtgcagccaggccccacagtggcctcaggagagaacgtgaccctgctgtgtcagtcatggcggcagttccacactttccttctgaccaaggcgggagcagctgatgccccactccgtctaagatcaatacacgaatatcctaagtaccaggctgaattccccatgagtcctgtgacctcagcccacgcggggacctacaggtgctacggctcactcaactccgacccctacctgctgtctcaccccagtgagcccctggagctcgtggtctcaggaccctccatgggttccagccccccacccaccggtcccatctccacacctgcaggccctgaggaccagcccctcacccccactgggtcggatccccaaagtggtctgggaaggcacctgggggttgtgatcggcatcttggtggccgtcgtcctactgctcctcctcctcctcctcctcttcctcatcctccgacatcgacgtcagggcaaacactggacatcgagtccagcccagctgccgacgcccaggaagaaaacctctatgctgccgtgaaggacacacagcctgaagatggggtggagatggacactcgggctgctgcatctgaagccccccaggatgtgacctacgcccagctgcacagcttgaccctcagacggaaggcaactgagcctcctccatcccaggaaagggaacctccagctgagcccagcatctacgccaccctggccatccactagcccggagggtacgcagactccacactcagtagaaggagactcaggactgctgaaggcacgggagctgcccccagtggacaccaatgaaccccagtcagcctggacccctaacaaagaccatgaggagatgctgggaactttgggactcacttgattctgcagtcgaaataactaatatccctacattttttaattaaagcaacagacttctcaataatcaatgagttaaccgagaaaactaaaatcagaagtaagaatgtgctttaaactgaatcacaatataaatattacacatcacacaatgaaattgaaaaagtacaaaccacaaatgaaaaaagtagaaacgaaaaaaaaaaactaggaaatgaatgacgttggctttcgtataaggaatttagaaaaagaataaccaattattccaaatgaaggtgtaagaaagggaataagaagaagaagagttgctcatgaggaaaaaccaaaacttgaaaattcaacaaagccaatgaagctcattcttgaaaatattaattacagtcataaatcctaactacattgagcaagagaaagaaagagcaggcacgcatttccatatgggagtgagccagcagacagcccagcagatcctacacacattttcacaaactaaccccagaacaggctgcaaacctataccaatatactagaaaatgcagattaaatggatgaaatattcaaaactggagtttacataatgaacgtaagagtaatcagagaatctgactcattttaaatgtgtgtgtatgtgtgtgtatatatatgtgtgtgtgtgtgtgtgtgtgtgtgtgtgaaaaacattgactgtaataaaaatgttcccatcgtaaaaaaaaaaaaaaaa

SEQ ID NO: 117 - protein, 510 aa, Homo sapiens
MTPIVTVLICLGLSLGPRTRVQTGTIPKPTLWAEPDSVITQGSPVTLSCQGSLEAQEYRLYREKKSASWITRIRPELVKNGQFHIPSITWEHTGRYGCQYYSRARWSELSDPLVLVMTGAYPKPTLSAQPSPVVTSGGRVTLQCESQVAFGGFILCKEGEDEHPQCLNSQPHARGSSRAIFSVGPVSPNRRWSHRCYGYDLNSPYVWSSPSDLLELLVPGVSKKPSLSVQPGPVMAPGESLTLQCVSDVGYDRFVLYKEGERDLRQLPGRQPQAGLSQANFTLGPVSRSYGGQYRCYGAHNLSSECSAPSDPLDILITGQIRGTPFISVQPGPTVASGENVTLLCQSWRQFHTFLLTKAGAADAPLRLRSIHEYPKYQAEFPMSPVTSAHAGTYRCYGSLNSDPYLLSHPSEPLELVVSGPSMGSSPPPTGPISTPAGPEDQPLTPTGSDPQSGLGRHLGVVIGILVAVVLLLLLLLLLFLILRHRRQGKHWTSSPAQLPTPRKKTSMLP

SEQ ID NO: 118 - DNA, 1422 bp, Homo sapiens
caccgagggctcatccatccgcagagcagggcagtgggaggagacgccatgacccccatcgtcacagtcctgatctgtctcgggctgagtctgggccccaggacccgcgtgcagacagggaccatccccaagcccaccctgtgggctgagccagactctgtgatcacccaggggagtcccgtcaccctcagttgtcaggggagccttgaagcccaggagtaccgtctatatagggagaaaaaatcagcatcttggattacacggatacgaccagagcttgtgaagaacggccagttccacatcccatccatcacctgggaacacacagggcgatatggctgtcagtattacagccgcgctcggtggtctgagctcagtgaccccctggtgctggtgatgacaggagcctacccaaaacccaccctctcagcccagcccagccctgtggtgacctcaggaggaagggtgaccctccagtgtgagtcacaggtggcatttggcggcttcattctgtgtaaggaaggagaagatgaacacccacaatgcctgaactcccagccccatgcccgtgggtcgtcccgcgccatcttctccgtgggccccgtgagcccgaatcgcaggtggtcgcacaggtgctatggttatgacttgaactctccctatgtgtggtcttcacccagtgatctcctggagctcctggtcccaggtgtttctaagaagccatcactctcagtgcagccgggtcctgtcatggcccctggggaaagcctgaccctccagtgtgtctctgatgtcggctatgacagatttgttctgtacaaggagggggaacgtgaccttcgccagctccctggccggcagccccaggctgggctctcccaggccaacttcaccctgggccctgtgagccgctcctacgggggccagtacagatgctacggtgcacacaacctctcctctgagtgctcggcccccagcgaccccctggacatcctgatcacaggacagatccgtggcacacccttcatctcagtgcagccaggccccacagtggcctcaggagagaacgtgaccctgctgtgtcagtcatggcggcagttccacactttccttctgaccaaggcgggagcagctgatgccccactccgtctaagatcaatacacgaatatcctaagtaccaggctgaattccccatgagtcctgtgacctcagcccacgcggggacctacaggtgctacggctcactcaactccgacccctacctgctgtctcaccccagtgagcccctggagctcgtggtctcaggaccctccatgggttccagccccccacccaccggtcccatctccacacctgcaggccctgaggaccagcccctcacccccactgggtcggatccccaaagtggtgagtgaggggct

SEQ ID NO: 119 - protein, 455 aa, Homo sapiens
MTPIVTVLICLGLSLGPRTRVQTGTIPKPTLWAEPDSVITQGSPVTLSCQGSLEAQEYRLYREKKSASWITRIRPELVKNGQFHIPSITWEHTGRYGCQYYSRARWSELSDPLVLVMTGAYPKPTLSAQPSPVVTSGGRVTLQCESQVAFGGFILCKEGEDEHPQCLNSQPHARGSSRAIFSVGPVSPNRRWSHRCYGYDLNSPYVWSSPSDLLELLVPGVSKKPSLSVQPGPVMAPGESLTLQCVSDVGYDRFVLYKEGERDLRQLPGRQPQAGLSQANFTLGPVSRSYGGQYRCYGAHNLSSECSAPSDPLDILITGQIRGTPFISVQPGPTVASGENVTLLCQSWRQFHTFLLTKAGAADAPLRLRSIHEYPKYQAEFPMSPVTSAHAGTYRCYGSLNSDPYLLSHPSEPLELVVSGPSMGSSPPPTGPISTPAGPEDQPLTPTGSDPQSGE

SEQ ID NO: 120 - DNA, 3686 bp, Homo sapiens
cttcagatagattatatctggagtgaagaatcctgccacctatgtatctggcatagtattctgtgtagtgggatgagcagagaacaaaaacaaaataatccagtgagaaaagcccgtaaataaaccttcagaccagagatctattctctagcttattttaagctcaacttaaaaagaagaactgttctctgattcttttcgccttcaatacacttaatgatttaactccaccctccttcaaaagaaacagcatttcctacttttatactgtctatatgattgatttgcacagctcatctggccagaagagctgagacatccgttcccctacaagaaactctccccgggtggaacaagatggattatcaagtgtcaagtccaatctatgacatcaattattatacatcggagccctgccaaaaaatcaatgtgaagcaaatcgcagcccgcctcctgcctccgctctactcactggtgttcatctttggttttgtgggcaacatgctggtcatcctcatcctgataaactgcaaaaggctgaagagcatgactgacatctacctgctcaacctggccatctctgacctgtttttccttcttactgtccccttctgggctcactatgctgccgcccagtgggactttggaaatacaatgtgtcaactcttgacagggctctattttataggcttcttctctggaatcttcttcatcatcctcctgacaatcgataggtacctggctgtcgtccatgctgtgtttgctttaaaagccaggacggtcacctttggggtggtgacaagtgtgatcacttgggtggtggctgtgtttgcgtctctcccaggaatcatctttaccagatctcaaaaagaaggtcttcattacacctgcagctctcattttccatacagtcagtatcaattctggaagaatttccagacattaaagatagtcatcttggggctggtcctgccgctgcttgtcatggtcatctgctactcgggaatcctaaaaactctgcttcggtgtcgaaatgagaagaagaggcacagggctgtgaggcttatcttcaccatcatgattgtttattttctcttctgggctccctacaacattgtccttctcctgaacaccttccaggaattctttggcctgaataattgcagtagctctaacaggttggaccaagctatgcaggtgacagagactcttgggatgacgcactgctgcatcaaccccatcatctatgcctttgtcggggagaagttcagaaactacctcttagtcttcttccaaaagcacattgccaaacgcttctgcaaatgctgttctattttccagcaagaggctcccgagcgagcaagctcagtttacacccgatccactggggagcaggaaatatctgtgggcttgtgacacggactcaagtgggctggtgacccagtcagagttgtgcacatggcttagttttcatacacagcctgggctgggggtggggtgggagaggtcttttttaaaaggaagttactgttatagagggtctaagattcatccatttatttggcatctgtttaaagtagattagatcttttaagcccatcaattatagaaagccaaatcaaaatatgttgatgaaaaatagcaacctttttatctccccttcacatgcatcaagttattgacaaactctcccttcactccgaaagttccttatgtatatttaaaagaaagcctcagagaattgctgattcttgagtttagtgatctgaacagaaataccaaaattatttcagaaatgtacaactttttacctagtacaaggcaacatataggttgtaaatgtgtttaaaacaggtctttgtcttgctatggggagaaaagacatgaatatgattagtaaagaaatgacacttttcatgtgtgatttcccctccaaggtatggttaataagtttcactgacttagaaccaggcgagagacttgtggcctgggagagctggggaagcttcttaaatgagaaggaatttgagttggatcatctattgctggcaaagacagaagcctcactgcaagcactgcatgggcaagcttggctgtagaaggagacagagctggttgggaagacatggggaggaaggacaaggctagatcatgaagaaccttgacggcattgctccgtctaagtcatgagctgagcagggagatcctggttggtgttgcagaaggtttactctgtggccaaaggagggtcaggaaggatgagcatttagggcaaggagaccaccaacagccctcaggtcagggtgaggatggcctctgctaagctcaaggcgtgaggatgggaaggagggaggtattcgtaaggatgggaaggagggaggtattcgtgcagcatatgaggatgcagagtcagcagaactggggtggatttgggttggaagtgagggtcagagaggagtcagagagaatccctagtcttcaagcagattggagaaacccttgaaaagacatcaagcacagaaggaggaggaggaggtttaggtcaagaagaagatggattggtgtaaaaggatgggtctggtttgcagagcttgaacacagtctcacccagactccaggctgtctttcactgaatgcttctgacttcatagatttccttcccatcccagctgaaatactgaggggtctccaggaggagactagatttatgaatacacgaggtatgaggtctaggaacatacttcagctcacacatgagatctaggtgaggattgattacctagtagtcatttcatgggttgttgggaggattctatgaggcaaccacaggcagcatttagcacatactacacattcaataagcatcaaactcttagttactcattcagggatagcactgagcaaagcattgagcaaaggggtcccatagaggtgagggaagcctgaaaaactaagatgctgcctgcccagtgcacacaagtgtaggtatcattttctgcatttaaccgtcaataggcaaaggggggaagggacatattcatttggaaataagctgccttgagccttaaaacccacaaaagtacaatttaccagcctccgtatttcagactgaatgggggtggggggggcgccttaggtacttattccagatgccttctccagacaaaccagaagcaacagaaaaaatcgtctctccctccctttgaaatgaatataccccttagtgtttgggtatattcatttcaaagggagagagagaggtttttttctgttctgtctcatatgattgtgcacatacttgagactgttttgaatttgggggatggctaaaaccatcatagtacaggtaaggtgagggaatagtaagtggtgagaactactcagggaatgaaggtgtcagaataataagaggtgctactgactttctcagcctctgaatatgaacggtgagcattgtggctgtcagcaggaagcaacgaagggaaatgtctttccttttgctcttaagttgtggagagtgcaacagtagcataggaccctaccctctgggccaagtcaaagacattctgacatcttagtatttgcatattcttatgtatgtgaaagttacaaattgcttgaaagaaaatatgcatctaataaaaaacaccttctaaaataaaaaaaaaaaaaaaaaaaaaaaaaaa

SEQ ID NO: 121 - DNA, 3451 bp, Homo sapiens
cttcagatagattatatctggagtgaagaatcctgccacctatgtatctggcatagtctcatctggccagaagagctgagacatccgttcccctacaagaaactctccccgggtggaacaagatggattatcaagtgtcaagtccaatctatgacatcaattattatacatcggagccctgccaaaaaatcaatgtgaagcaaatcgcagcccgcctcctgcctccgctctactcactggtgttcatctttggttttgtgggcaacatgctggtcatcctcatcctgataaactgcaaaaggctgaagagcatgactgacatctacctgctcaacctggccatctctgacctgtttttccttcttactgtccccttctgggctcactatgctgccgcccagtgggactttggaaatacaatgtgtcaactcttgacagggctctattttataggcttcttctctggaatcttcttcatcatcctcctgacaatcgataggtacctggctgtcgtccatgctgtgtttgctttaaaagccaggacggtcacctttggggtggtgacaagtgtgatcacttgggtggtggctgtgtttgcgtctctcccaggaatcatctttaccagatctcaaaaagaaggtcttcattacacctgcagctctcattttccatacagtcagtatcaattctggaagaatttccagacattaaagatagtcatcttggggctggtcctgccgctgcttgtcatggtcatctgctactcgggaatcctaaaaactctgcttcggtgtcgaaatgagaagaagaggcacagggctgtgaggcttatcttcaccatcatgattgtttattttctcttctgggctccctacaacattgtccttctcctgaacaccttccaggaattctttggcctgaataattgcagtagctctaacaggttggaccaagctatgcaggtgacagagactcttgggatgacgcactgctgcatcaaccccatcatctatgcctttgtcggggagaagttcagaaactacctcttagtcttcttccaaaagcacattgccaaacgcttctgcaaatgctgttctattttccagcaagaggctcccgagcgagcaagctcagtttacacccgatccactggggagcaggaaatatctgtgggcttgtgacacggactcaagtgggctggtgacccagtcagagttgtgcacatggcttagttttcatacacagcctgggctgggggtggggtgggagaggtcttttttaaaaggaagttactgttatagagggtctaagattcatccatttatttggcatctgtttaaagtagattagatcttttaagcccatcaattatagaaagccaaatcaaaatatgttgatgaaaaatagcaacctttttatctccccttcacatgcatcaagttattgacaaactctcccttcactccgaaagttccttatgtatatttaaaagaaagcctcagagaattgctgattcttgagtttagtgatctgaacagaaataccaaaattatttcagaaatgtacaactttttacctagtacaaggcaacatataggttgtaaatgtgtttaaaacaggtctttgtcttgctatggggagaaaagacatgaatatgattagtaaagaaatgacacttttcatgtgtgatttcccctccaaggtatggttaataagtttcactgacttagaaccaggcgagagacttgtggcctgggagagctggggaagcttcttaaatgagaaggaatttgagttggatcatctattgctggcaaagacagaagcctcactgcaagcactgcatgggcaagcttggctgtagaaggagacagagctggttgggaagacatggggaggaaggacaaggctagatcatgaagaaccttgacggcattgctccgtctaagtcatgagctgagcagggagatcctggttggtgttgcagaaggtttactctgtggccaaaggagggtcaggaaggatgagcatttagggcaaggagaccaccaacagccctcaggtcagggtgaggatggcctctgctaagctcaaggcgtgaggatgggaaggagggaggtattcgtaaggatgggaaggagggaggtattcgtgcagcatatgaggatgcagagtcagcagaactggggtggatttgggttggaagtgagggtcagagaggagtcagagagaatccctagtcttcaagcagattggagaaacccttgaaaagacatcaagcacagaaggaggaggaggaggtttaggtcaagaagaagatggattggtgtaaaaggatgggtctggtttgcagagcttgaacacagtctcacccagactccaggctgtctttcactgaatgcttctgacttcatagatttccttcccatcccagctgaaatactgaggggtctccaggaggagactagatttatgaatacacgaggtatgaggtctaggaacatacttcagctcacacatgagatctaggtgaggattgattacctagtagtcatttcatgggttgttgggaggattctatgaggcaaccacaggcagcatttagcacatactacacattcaataagcatcaaactcttagttactcattcagggatagcactgagcaaagcattgagcaaaggggtcccatagaggtgagggaagcctgaaaaactaagatgctgcctgcccagtgcacacaagtgtaggtatcattttctgcatttaaccgtcaataggcaaaggggggaagggacatattcatttggaaataagctgccttgagccttaaaacccacaaaagtacaatttaccagcctccgtatttcagactgaatgggggtggggggggcgccttaggtacttattccagatgccttctccagacaaaccagaagcaacagaaaaaatcgtctctccctccctttgaaatgaatataccccttagtgtttgggtatattcatttcaaagggagagagagaggtttttttctgttctgtctcatatgattgtgcacatacttgagactgttttgaatttgggggatggctaaaaccatcatagtacaggtaaggtgagggaatagtaagtggtgagaactactcagggaatgaaggtgtcagaataataagaggtgctactgactttctcagcctctgaatatgaacggtgagcattgtggctgtcagcaggaagcaacgaagggaaatgtctttccttttgctcttaagttgtggagagtgcaacagtagcataggaccctaccctctgggccaagtcaaagacattctgacatcttagtatttgcatattcttatgtatgtgaaagttacaaattgcttgaaagaaaatatgcatctaataaaaaacaccttctaaaataaaaaaaaaaaaaaaaaaaaaaaaaaa

SEQ ID NO: 122 - protein, 352 aa, Homo sapiens [sequence omitted]

SEQ ID NO: 123 - DNA, 2009 bp, Homo sapiens
agaaactatttcagtttgctagaggaacattttaaatctgaattgaaccacccattttcctttcttagccaaatcaccaaaatgtccagttagaacaagaatttagcattctgcaaaagaagttaacagctgagataacgaggaaatattctgaaatggatcccaaatatttcatcttaattttgttttgtggacacctgaacaatacatttttttcaaagacagagacaattacaacagagaagcagtcacagcctaccttattcacatcatcaatgtcacaggtattggctaattctcaaaacacaacagggaatcctttgggtcaaccaacacaattcagcgacactttttctggacaatcaatatcacctgccaaagtcactgctggacaaccaacaccagctgtctatacctcttctgaaaaaccagaagcacatacttctgctggacaaccacttgcctacaacaccaaacaaccaacaccaatagccaacacctcctcccagcaagccgtgttcacctctgccagacaactaccatctgcccgtacttctaccacacaaccaccaaagtcatttgtctatacttttactcaacaatcatcatctgtccagatcccttctagaaaacaaataactgttcataatccatccacacaaccaacatcaactgtcaaaaattcacctaggagtacaccaggatttatcttagatactaccagtaacaaacaaaccccacaaaaaaacaattataattcaatagctgccatactaattggtgtacttctgacttctatgttggtagctataatcatcattgtactttggaaatgcttaaggaaaccagttttaaatgatcaaaattgggcaggtagatctccatttgctgatggagaaacccctgacatttgtatggataacatcagagaaaatgaaatatccacaaaacgtacatcaatcatttcacttacaccctggaaaccaagcaaaagcacacttttagcagatgacttagaaattaagttgtttgaatcaagtgaaaacattgaagactccaacaaccccaaaacagagaaaataaaagatcaagtaaatggtacatcagaagatagtgctgatggttcaacagttggaactgctgtttcttcttcagatgatgcagatctgcctccaccacctccccttctggatttggaaggacaggaaagtaaccaatctgacaaacccacaatgacaattgtatctcctcttccaaatgattctactagtctccctccatctctggactgtctcaatcaagactgtggagatcataaatctgagataatacaatcatttccaccgcttgactcacttaacttgcccctgccaccagtagattttatgaaaaaccaagaagattccaaccttgagatccagtgtcaggagttctctattcctcccaactctgatcaagatcttaatgaatccctgccacctccacctgcagaactgttataaatattacaacttgctttttagctgatcttccatcctcaaatgactcttttttctttatatgttaacatatataaaatggcaactgatagtcaattttgatttttattcaggaactatctgaaatctgctcagagcctatgtgcatagatgaaacttttttttaaaaaaagttatttaacagtaatctatttactaattatagtacctatctttaaagtatagtacattttacatatgtaaatggtatgtttcaataatttaagaactctgaaacaatctacatatacttattacccagtacagttttttttcccctgaaaagctgtgtataaaattatggtgaataaacttttatgtttccatttcaaagaccagggtggagaggaataagagactaagtatatgcttcaagttttaaattaatacctcaagtattaaataaatattccaagtttgtgggaatgggagattaaaatgcatgtttgagaatagaaaaaaaaaaaaaaa

SEQ ID NO: 124 - protein, 448 aa, Homo sapiens
MDPKYFILILFCGHLNNTFFSKTETITTEKQSQPTLFTSSMSQVLANSQNTTGNPLGQPTQFSDTFSGQSISPAKVTAGQPTPAVYTSSEKPEAHTSAGQPLAYNTKQPTPIANTSSQQAVFTSARQLPSARTSTTQPPKSFVYTFTQQSSSVQIPSRKQITVHNPSTQPTSTVKNSPRSTPGFILDTTSNKQTPQKNNYNSIAAILIGVLLTSMLVAIIIIVLWKCLRKPVLNDQNWAGRSPFADGETPDICMDNIRENEISTKRTSIISLTPWKPSKSTLLADDLEIKLFESSENIEDSNNPKTEKIKDQVNGTSEDSADGSTVGTAVSSSDDADLPPPPPLLDLEGQESNQSDKPTMTIVSPLPNDSTSLPPSLDCLNQDCGDHKSEIIQSFPPLDSLNLPLPPVDFMKNQEDSNLEIQCQEFSIPPNSDQDLNESLPPPPAELL

SEQ ID NO: 125 - DNA, 3529 bp, Mus musculus
tactgataaacttcctctgctgcacagaagccgtctcagtgcgctggagaccaccgttaatccgcactgaaacacccctttgctctctcagccaaatcaccaacatgtcctgttagaacaagaatttacattctgcgaaagaagttcacaggagaaaacatctgaaatggaattcaagtatctggtcttcattgtgctttgtcaatacctggacaatacgtttttctcagagacagaagcaattacaacagagcagcaatcactgtctactttaatcacaccgtcgttatatgttacaactgattctcaaaacacagcagggaatgctttgagtcagacaacaagattcaagaacatttcttctggacagcaagcatcacctgcccaaatcactcctgaacaagcaacaccagctgtttatgtctcttcaagcccacttacttataacattaccagacaagcagaatcagcggtcaacaactccttgcctcaaacatcaccatctgggttcactttgaccaatcagccatcaccttctacctataattctactggacaaccaccaaaacatcttgtctatacttccacacaacagccaccatcacctgctcctacctcttctggaaaaccagaagtagagtctactcataatcagcccacaaaatcaacaccaactatttatttacaaagggacacaccaccaccaccaccaccaccactcacttcagaaccaccaagtggcaaaggaactgctcataaaaacaaccacaatgcaattgctgccatattaatcggtactattataatttctatgttggtagctatactcatgattatactgtggaaatacttgaggaagccagtcttaaatgatcaaaactgggcaggtaggtctccatttgctgatggagaaacaccagaaatgtgtatggataacatcagagagagtgaggcatccacaaagcgtgcatcagttgtctcacttatgacctggaaaccaagtaaaagcacactgctagcagatgatttagaagttaagttgtttgaatcaagtgaacacattaatgataccagcaacctcaagactgataatgtagaagttcaaataaatggcttatcagaagacagtgctgatgggtcaacagttggtacagccgtgtcttcagatgatgcagatctggccctgccacctccccttcttgatttggatgagaacctaccaaacaagcccacagtgacagttgtatctcctttaccaaatgattctatcaatccccaaccatctccagatggtctaaatcaagtgtgtgaagaacagcattccaagatccaagagccattcccgccaccccctgactcatttaatgtgcctctgtcagcaggagattttataaacaatcaagagtcggcccacgaggctcaatgccaggagttctctactcctgacctccatccagacctcacagactccctgccacctccacctacagagctgctgtaaagtgacagctggctttctagactgccctccatcctgagatggcaccgacacgttcctgtcttcgtggtatggcacacaggacatgacacctggcacctgagagactctttagggactacctgacccctgactgaagcccacgtacacgggtagattattacagtggtatgcttaccagctacagaagtaatttttaaatcagagtgccttttatatatgttaatgatagatatttcaataacttaatcactttggaaacatatgatctacatatacttattattacccaatagatttcccccgaaaagctgtatataaacatatcttaaataaataaaattctattttttccacctcaaaatttggggtataataaaaatggaaatttttaaatggtcaaagttttaatacttcaaatattaagtaaatattttcatttatagagattaaacacacagctaccaaactgtattaaaacatgaagtctgagtgctgtgtttgggatacatttaccctgaaaaagtgagcacttaccataaaattttcttttttctttataattaaaaattttatgtatataagagttttgcctgaatatgtgtgtatatattcatatagtcacacacacacacatatatataagacagaagatggcactactaacatttgccaatgccccgtgagtcctggaactgactccaagtcctctgtaagtgctcttaaccaccgagcccctgcaactccgttcttcccctcctcttcctcctcctcctcttcctcctcctcttcctcttcaaatgtttggggcgtgggggtggaggtcaaagagataggctgtatttggggttagaagatgacttgtgggagttgatttttttcttccacctcaaggataaaattcagaactcaagtcatgagacctgacagcaagcaacctttatcctctaagcccatctcactgcccccaaaatgtaaacatttttctaaaatgttagggaagcataaactaaccacttagacaaaaatcaaatgatatggaagacgggagaaaaaaatagaagtgggctgtatctgtgtgtctcttcccacacatgcatgataccagcctgtgtgagggtgtctgtggagaccacagaggataccagccatcctggaactgaagtcccaggaagttatgagctgctgtctaacacgggtactgggaactgaacttgggtcctataggacagcagcaagttctctaaagtactgacccatcactgcagccccagcctccttttgtaaatgcaggaatgtaatcatcacctgaaggttgttgagtatgaggcactcagaacagaagtgggcacaacttttgttaaagtggaggcggcagtgggtactggcctaccttttgcagatgtcaaatgttcatctgcccaacaagccatccttctcttattattattacaagtccaagaaaggacagttgcttagagcacagattttggcacttttcaagatagtatatagtatttattggtaacattaatgttcaaatactaaaaatcccatgtagaataaaaacaagaaggttctcgggcagtggagttttactactactgctactattactactacatactactactattatttagtatataattatcaataaacaattattatacatattataaatacatgtaaatttattattgttgttgtttgtgttctgagacaggagtcctctggtagccctggctgtcctggcactctctctctatagacccactgtcctcaaactcacagatacacctgcctctgtctcccaatctttgtgattaacggtgtgacctttaaacaccttaaaagacactgggcttaagtgttattttacatacaatacttaccttacttcttacaagccacctcttactgataacactttttttatctacagaaacacctacttcaagcatgatggcgtttcattttattacattggttcttttctgtcattcacaataaaatttctcacgtgtcttc

SEQ ID NO: 126 - protein, 444 aa, Mus musculus
MEFKYLVFIVLCQYLDNTFFSETEAITTEQQSLSTLITPSLYVTTDSQNTAGNALSQTTRFKNISSGQQASPAQITPEQATPAVYVSSSPLTYNITRQAESAVNNSLPQTSPSGFTLTNQPSPSTYNSTGQPPKHLVYTSTQQPPSPAPTSSGKPEVESTHNQPTKSTPTIYLQRDTPPPPPPPLTSEPPSGKGTAHKNNHNAIAAILIGTIIISMLVAILMIILWKYLRKPVLNDQNWAGRSPFADGETPEMCMDNIRESEASTKRASVVSLMTWKPSKSTLLADDLEVKLFESSEHINDTSNLKTDNVEVQINGLSEDSADGSTVGTAVSSDDADLALPPPLLDLDENLPNKPTVTVVSPLPNDSINPQPSPDGLNQVCEEQHSKIQEPFPPPPDSFNVPLSAGDFINNQESAHEAQCQEFSTPDLHPDLTDSLPPPPTELL

SEQ ID NO: 127 - DNA, 2622 bp, Homo sapiens
agcatagtttcatttcctgctcttgaatatctggttgaactacttaagcttaatttgttaaactccggtaagtacctagcccacatgatttgactcagagattctcttttgtccacagacagtcatctcaggagcagaaagaaaagagctcccaaatgctatatctattcaggggctctcaagaacaatggaatatcatcctgatttagaaaatttggatgaagatggatatactcaattacacttcgactctcaaagcaataccaggatagctgttgtttcagagaaaggatcgtgtgctgcatctcctccttggcgcctcattgctgtaattttgggaatcctatgcttggtaatactggtgatagctgtggtcctgggtaccatggctatttggagatccaattcaggaagcaacacattggagaatggctactttctatcaagaaataaagagaaccacagtcaacccacacaatcatctttagaagacagtgtgactcctaccaaagctgtcaaaaccacaggggttctttccagcccttgtcctcctaattggattatatatgagaagagctgttatctattcagcatgtcactaaattcctgggatggaagtaaaagacaatgctggcaactgggctctaatctcctaaagatagacagctcaaatgaattgggatttatagtaaaacaagtgtcttcccaacctgataattcattttggataggcctttctcggccccagactgaggtaccatggctctgggaggatggatcaacattctcttctaacttatttcagatcagaaccacagctacccaagaaaacccatctccaaattgtgtatggattcacgtgtcagtcatttatgaccaactgtgtagtgtgccctcatatagtatttgtgagaagaagttttcaatgtaagaggaagggtggagaaggagagagaaatatgtgaggtagtaaggaggacagaaaacagaacagaaaagagtaacagctgaggtcaagataaatgcagaaaatgtttagagagcttggccaactgtaatcttaaccaagaaattgaagggagaggctgtgatttctgtatttgtcgacctacaggtaggctagtattatttttctagttagtagatccctagacatggaatcagggcagccaagcttgagtttttattttttatttatttatttttttgagatagggtctcactttgttacccaggctggagtgcagtggcacaatctcgactcactgcagctatctctcgcctcagcccctcaagtagctgggactacaggtgcatgccaccatgccaggctaatttttggtgttttttgtagagactgggttttgccatgttgaccaagctggtctctaactcctgggcttaagtgatctgcccgccttggcctcccaaagtgctgggattacagatgtgagccaccacacctggccccaagcttgaattttcattctgccattgacttggcatttaccttgggtaagccataagcgaatcttaatttctggctctatcagagttgtttcatgctcaacaatgccattgaagtgcacggtgtgttgccacgatttgaccctcaacttctagcagtatatcagttatgaactgagggtgaaatatatttctgaatagctaaatgaagaaatgggaaaaaatcttcaccacagtcagagcaattttattattttcatcagtatgatcataattatgattatcatcttagtaaaaagcaggaactcctactttttctttatcaattaaatagctcagagagtacatctgccatatctctaatagaatctttttttttttttttttttttgagacagagtttcgctcttgttgcccaggctggagtgcaacggcacgatctcggctcaccgcaacctccgccccctgggttcaagcaattctcctgcctcagcctcccaagtagctgggattacagtcaggcaccaccacacccggctaattttgtatttttttagtagagacagggtttctccatgtcggtcagggtagtcccgaactcctgacctcaagtgatctgcctgcctcggcctcccaagtgctgggattacaggcgtgagccactgcacccagcctagaatcttgtataatatgtaattgtagggaaactgctctcataggaaagttttctgctttttaaatacaaaaatacataaaaatacataaaatctgatgatgaatataaaaaagtaaccaacctcattggaacaagtattaacattttggaatatgttttattagttttgtgatgtactgttttacaatttttaccatttttttcagtaattactgtaaaatggtattattggaatgaaactatatttcctcatgtgctgatttgtcttatttttttcatactttcccactggtgctatttttatttccaatggatatttctgtattactagggaggcatttacagtcctctaatgttgattaatatgtgaaaagaaattgtaccaattttactaaattatgcagtttaaaatggatgattttatgttatgtggatttcatttcaataaaaaaaaactcttatcaaaaaaaaaaaaaaaa

SEQ ID NO: 128 - protein, 247 aa, Homo sapiens
MEYHPDLENLDEDGYTQLHFDSQSNTRIAVVSEKGSCAASPPWRLIAVILGILCLVILVIAVVLGTMAIWRSNSGSNTLENGYFLSRNKENHSQPTQSSLEDSVTPTKAVKTTGVLSSPCPPNWIIYEKSCYLFSMSLNSWDGSKRQCWQLGSNLLKIDSSNELGFIVKQVSSQPDNSFWIGLSRPQTEVPWLWEDGSTFSSNLFQIRTTATQENPSPNCVWIHVSVIYDQLCSVPSYSICEKKFSM

SEQ ID NO: 129 - DNA, 2484 bp, Homo sapiens
agcatagtttcatttcctgctcttgaatatctggttgaactacttaagcttaatttgttaaactccggtaagtacctagcccacatgatttgactcagagattctcttttgtccacagacagtcatctcaggagcagaaagaaaagagctcccaaatgctatatctattcaggggctctcaagaacaatggaatatcatcctgatttagaaaatttggatgaagatggatatactcaattacacttcgactctcaaagcaataccaggatagctgttgtttcagagaaaggatcgtgtgctgcatctcctccttggcgcctcattgctgtaattttgggaatcctatgcttggtaatactggtgatagctgtggtcctgggtaccatgggggttctttccagcccttgtcctcctaattggattatatatgagaagagctgttatctattcagcatgtcactaaattcctgggatggaagtaaaagacaatgctggcaactgggctctaatctcctaaagatagacagctcaaatgaattgggatttatagtaaaacaagtgtcttcccaacctgataattcattttggataggcctttctcggccccagactgaggtaccatggctctgggaggatggatcaacattctcttctaacttatttcagatcagaaccacagctacccaagaaaacccatctccaaattgtgtatggattcacgtgtcagtcatttatgaccaactgtgtagtgtgccctcatatagtatttgtgagaagaagttttcaatgtaagaggaagggtggagaaggagagagaaatatgtgaggtagtaaggaggacagaaaacagaacagaaaagagtaacagctgaggtcaagataaatgcagaaaatgtttagagagcttggccaactgtaatcttaaccaagaaattgaagggagaggctgtgatttctgtatttgtcgacctacaggtaggctagtattatttttctagttagtagatccctagacatggaatcagggcagccaagcttgagtttttattttttatttatttatttttttgagatagggtctcactttgttacccaggctggagtgcagtggcacaatctcgactcactgcagctatctctcgcctcagcccctcaagtagctgggactacaggtgcatgccaccatgccaggctaatttttggtgttttttgtagagactgggttttgccatgttgaccaagctggtctctaactcctgggcttaagtgatctgcccgccttggcctcccaaagtgctgggattacagatgtgagccaccacacctggccccaagcttgaattttcattctgccattgacttggcatttaccttgggtaagccataagcgaatcttaatttctggctctatcagagttgtttcatgctcaacaatgccattgaagtgcacggtgtgttgccacgatttgaccctcaacttctagcagtatatcagttatgaactgagggtgaaatatatttctgaatagctaaatgaagaaatgggaaaaaatcttcaccacagtcagagcaattttattattttcatcagtatgatcataattatgattatcatcttagtaaaaagcaggaactcctactttttctttatcaattaaatagctcagagagtacatctgccatatctctaatagaatctttttttttttttttttttttgagacagagtttcgctcttgttgcccaggctggagtgcaacggcacgatctcggctcaccgcaacctccgccccctgggttcaagcaattctcctgcctcagcctcccaagtagctgggattacagtcaggcaccaccacacccggctaattttgtatttttttagtagagacagggtttctccatgtcggtcagggtagtcccgaactcctgacctcaagtgatctgcctgcctcggcctcccaagtgctgggattacaggcgtgagccactgcacccagcctagaatcttgtataatatgtaattgtagggaaactgctctcataggaaagttttctgctttttaaatacaaaaatacataaaaatacataaaatctgatgatgaatataaaaaagtaaccaacctcattggaacaagtattaacattttggaatatgttttattagttttgtgatgtactgttttacaatttttaccatttttttcagtaattactgtaaaatggtattattggaatgaaactatatttcctcatgtgctgatttgtcttatttttttcatactttcccactggtgctatttttatttccaatggatatttctgtattactagggaggcatttacagtcctctaatgttgattaatatgtgaaaagaaattgtaccaattttactaaattatgcagtttaaaatggatgattttatgttatgtggatttcatttcaataaaaaaaaactcttatcaaaaaaaaaaaaaaaa

SEQ ID NO: 130 - protein, 201 aa, Homo sapiens
MEYHPDLENLDEDGYTQLHFDSQSNTRIAVVSEKGSCAASPPWRLIAVILGILCLVILVIAVVLGTMGVLSSPCPPNWIIYEKSCYLFSMSLNSWDGSKRQCWQLGSNLLKIDSSNELGFIVKQVSSQPDNSFWIGLSRPQTEVPWLWEDGSTFSSNLFQIRTTATQENPSPNCVWIHVSVIYDQLCSVPSYSICEKKFSM

SEQ ID NO: 131 - DNA, 2503 bp, Homo sapiens
agcatagtttcatttcctgctcttgaatatctggttgaactacttaagcttaatttgttaaactccggtaagtacctagcccacatgatttgactcagagattctcttttgtccacagacagtcatctcaggagcagaaagaaaagagctcccaaatgctatatctattcaggggctctcaagaacaatggaatatcatcctgatttagaaaatttggatgaagatggatatactcaattacacttcgactctcaaagcaataccaggatagctgttgtttcagagaaaggatcgtgtgctgcatctcctccttggcgcctcattgctgtaattttgggaatcctatgcttggtaatactggtgatagctgtggtcctgggtaccatggctatttggagatccaattcaggaagcaacacattggagaatggctactttctatcaagaaataaagagaaccacagtcaacccacacaatcatctttagaagacagtgtgactcctaccaaagctgtcaaaaccacaggggttctttccagcccttgtcctcctaattggattatatatgagaagagctgttatctattcagcatgtcactaaattcctgggatggaagtaaaagacaatgctggcaactgggctctaatctcctaaagatagacagctcaaatgaattgatttcagatcagaaccacagctacccaagaaaacccatctccaaattgtgtatggattcacgtgtcagtcatttatgaccaactgtgtagtgtgccctcatatagtatttgtgagaagaagttttcaatgtaagaggaagggtggagaaggagagagaaatatgtgaggtagtaaggaggacagaaaacagaacagaaaagagtaacagctgaggtcaagataaatgcagaaaatgtttagagagcttggccaactgtaatcttaaccaagaaattgaagggagaggctgtgatttctgtatttgtcgacctacaggtaggctagtattatttttctagttagtagatccctagacatggaatcagggcagccaagcttgagtttttattttttatttatttatttttttgagatagggtctcactttgttacccaggctggagtgcagtggcacaatctcgactcactgcagctatctctcgcctcagcccctcaagtagctgggactacaggtgcatgccaccatgccaggctaatttttggtgttttttgtagagactgggttttgccatgttgaccaagctggtctctaactcctgggcttaagtgatctgcccgccttggcctcccaaagtgctgggattacagatgtgagccaccacacctggccccaagcttgaattttcattctgccattgacttggcatttaccttgggtaagccataagcgaatcttaatttctggctctatcagagttgtttcatgctcaacaatgccattgaagtgcacggtgtgttgccacgatttgaccctcaacttctagcagtatatcagttatgaactgagggtgaaatatatttctgaatagctaaatgaagaaatgggaaaaaatcttcaccacagtcagagcaattttattattttcatcagtatgatcataattatgattatcatcttagtaaaaagcaggaactcctactttttctttatcaattaaatagctcagagagtacatctgccatatctctaatagaatctttttttttttttttttttttgagacagagtttcgctcttgttgcccaggctggagtgcaacggcacgatctcggctcaccgcaacctccgccccctgggttcaagcaattctcctgcctcagcctcccaagtagctgggattacagtcaggcaccaccacacccggctaattttgtatttttttagtagagacagggtttctccatgtcggtcagggtagtcccgaactcctgacctcaagtgatctgcctgcctcggcctcccaagtgctgggattacaggcgtgagccactgcacccagcctagaatcttgtataatatgtaattgtagggaaactgctctcataggaaagttttctgctttttaaatacaaaaatacataaaaatacataaaatctgatgatgaatataaaaaagtaaccaacctcattggaacaagtattaacattttggaatatgttttattagttttgtgatgtactgttttacaatttttaccatttttttcagtaattactgtaaaatggtattattggaatgaaactatatttcctcatgtgctgatttgtcttatttttttcatactttcccactggtgctatttttatttccaatggatatttctgtattactagggaggcatttacagtcctctaatgttgattaatatgtgaaaagaaattgtaccaattttactaaattatgcagtttaaaatggatgattttatgttatgtggatttcatttcaataaaaaaaaactcttatcaaaaaaaaaaaaaaaa

SEQ ID NO: 132 - protein, 189 aa, Homo sapiens
MEYHPDLENLDEDGYTQLHFDSQSNTRIAVVSEKGSCAASPPWRLIAVILGILCLVILVIAVVLGTMAIWRSNSGSNTLENGYFLSRNKENHSQPTQSSLEDSVTPTKAVKTTGVLSSPCPPNWIIYEKSCYLFSMSLNSWDGSKRQCWQLGSNLLKIDSSNELISDQNHSYPRKPISKLCMDSRVSHL

SEQ ID NO: 133 - DNA, 2365 bp, Homo sapiens
agcatagtttcatttcctgctcttgaatatctggttgaactacttaagcttaatttgttaaactccggtaagtacctagcccacatgatttgactcagagattctcttttgtccacagacagtcatctcaggagcagaaagaaaagagctcccaaatgctatatctattcaggggctctcaagaacaatggaatatcatcctgatttagaaaatttggatgaagatggatatactcaattacacttcgactctcaaagcaataccaggatagctgttgtttcagagaaaggatcgtgtgctgcatctcctccttggcgcctcattgctgtaattttgggaatcctatgcttggtaatactggtgatagctgtggtcctgggtaccatgggggttctttccagcccttgtcctcctaattggattatatatgagaagagctgttatctattcagcatgtcactaaattcctgggatggaagtaaaagacaatgctggcaactgggctctaatctcctaaagatagacagctcaaatgaattgatttcagatcagaaccacagctacccaagaaaacccatctccaaattgtgtatggattcacgtgtcagtcatttatgaccaactgtgtagtgtgccctcatatagtatttgtgagaagaagttttcaatgtaagaggaagggtggagaaggagagagaaatatgtgaggtagtaaggaggacagaaaacagaacagaaaagagtaacagctgaggtcaagataaatgcagaaaatgtttagagagcttggccaactgtaatcttaaccaagaaattgaagggagaggctgtgatttctgtatttgtcgacctacaggtaggctagtattatttttctagttagtagatccctagacatggaatcagggcagccaagcttgagtttttattttttatttatttatttttttgagatagggtctcactttgttacccaggctggagtgcagtggcacaatctcgactcactgcagctatctctcgcctcagcccctcaagtagctgggactacaggtgcatgccaccatgccaggctaatttttggtgttttttgtagagactgggttttgccatgttgaccaagctggtctctaactcctgggcttaagtgatctgcccgccttggcctcccaaagtgctgggattacagatgtgagccaccacacctggccccaagcttgaattttcattctgccattgacttggcatttaccttgggtaagccataagcgaatcttaatttctggctctatcagagttgtttcatgctcaacaatgccattgaagtgcacggtgtgttgccacgatttgaccctcaacttctagcagtatatcagttatgaactgagggtgaaatatatttctgaatagctaaatgaagaaatgggaaaaaatcttcaccacagtcagagcaattttattattttcatcagtatgatcataattatgattatcatcttagtaaaaagcaggaactcctactttttctttatcaattaaatagctcagagagtacatctgccatatctctaatagaatctttttttttttttttttttttgagacagagtttcgctcttgttgcccaggctggagtgcaacggcacgatctcggctcaccgcaacctccgccccctgggttcaagcaattctcctgcctcagcctcccaagtagctgggattacagtcaggcaccaccacacccggctaattttgtatttttttagtagagacagggtttctccatgtcggtcagggtagtcccgaactcctgacctcaagtgatctgcctgcctcggcctcccaagtgctgggattacaggcgtgagccactgcacccagcctagaatcttgtataatatgtaattgtagggaaactgctctcataggaaagttttctgctttttaaatacaaaaatacataaaaatacataaaatctgatgatgaatataaaaaagtaaccaacctcattggaacaagtattaacattttggaatatgttttattagttttgtgatgtactgttttacaatttttaccatttttttcagtaattactgtaaaatggtattattggaatgaaactatatttcctcatgtgctgatttgtcttatttttttcatactttcccactggtgctatttttatttccaatggatatttctgtattactagggaggcatttacagtcctctaatgttgattaatatgtgaaaagaaattgtaccaattttactaaattatgcagtttaaaatggatgattttatgttatgtggatttcatttcaataaaaaaaaactcttatcaaaaaaaaaaaaaaaa

SEQ ID NO: 134 - protein, 143 aa, Homo sapiens
MEYHPDLENLDEDGYTQLHFDSQSNTRIAVVSEKGSCAASPPWRLIAVILGILCLVILVIAVVLGTMGVLSSPCPPNWIIYEKSCYLFSMSLNSWDGSKRQCWQLGSNLLKIDSSNELISDQNHSYPRKPISKLCMDSRVSHL

SEQ ID NO: 135 - DNA, 2385 bp, Homo sapiens
agcatagtttcatttcctgctcttgaatatctggttgaactacttaagcttaatttgttaaactccggtaagtacctagcccacatgatttgactcagagattctcttttgtccacagacagtcatctcaggagcagaaagaaaagagctcccaaatgctatatctattcaggggctctcaagaacaatggaatatcatcctgatttagaaaatttggatgaagatggatatactcaattacacttcgactctcaaagcaataccaggatagctgttgtttcagagaaaggggttctttccagcccttgtcctcctaattggattatatatgagaagagctgttatctattcagcatgtcactaaattcctgggatggaagtaaaagacaatgctggcaactgggctctaatctcctaaagatagacagctcaaatgaattgggatttatagtaaaacaagtgtcttcccaacctgataattcattttggataggcctttctcggccccagactgaggtaccatggctctgggaggatggatcaacattctcttctaacttatttcagatcagaaccacagctacccaagaaaacccatctccaaattgtgtatggattcacgtgtcagtcatttatgaccaactgtgtagtgtgccctcatatagtatttgtgagaagaagttttcaatgtaagaggaagggtggagaaggagagagaaatatgtgaggtagtaaggaggacagaaaacagaacagaaaagagtaacagctgaggtcaagataaatgcagaaaatgtttagagagcttggccaactgtaatcttaaccaagaaattgaagggagaggctgtgatttctgtatttgtcgacctacaggtaggctagtattatttttctagttagtagatccctagacatggaatcagggcagccaagcttgagtttttattttttatttatttatttttttgagatagggtctcactttgttacccaggctggagtgcagtggcacaatctcgactcactgcagctatctctcgcctcagcccctcaagtagctgggactacaggtgcatgccaccatgccaggctaatttttggtgttttttgtagagactgggttttgccatgttgaccaagctggtctctaactcctgggcttaagtgatctgcccgccttggcctcccaaagtgctgggattacagatgtgagccaccacacctggccccaagcttgaattttcattctgccattgacttggcatttaccttgggtaagccataagcgaatcttaatttctggctctatcagagttgtttcatgctcaacaatgccattgaagtgcacggtgtgttgccacgatttgaccctcaacttctagcagtatatcagttatgaactgagggtgaaatatatttctgaatagctaaatgaagaaatgggaaaaaatcttcaccacagtcagagcaattttattattttcatcagtatgatcataattatgattatcatcttagtaaaaagcaggaactcctactttttctttatcaattaaatagctcagagagtacatctgccatatctctaatagaatctttttttttttttttttttttgagacagagtttcgctcttgttgcccaggctggagtgcaacggcacgatctcggctcaccgcaacctccgccccctgggttcaagcaattctcctgcctcagcctcccaagtagctgggattacagtcaggcaccaccacacccggctaattttgtatttttttagtagagacagggtttctccatgtcggtcagggtagtcccgaactcctgacctcaagtgatctgcctgcctcggcctcccaagtgctgggattacaggcgtgagccactgcacccagcctagaatcttgtataatatgtaattgtagggaaactgctctcataggaaagttttctgctttttaaatacaaaaatacataaaaatacataaaatctgatgatgaatataaaaaagtaaccaacctcattggaacaagtattaacattttggaatatgttttattagttttgtgatgtactgttttacaatttttaccatttttttcagtaattactgtaaaatggtattattggaatgaaactatatttcctcatgtgctgatttgtcttatttttttcatactttcccactggtgctatttttatttccaatggatatttctgtattactagggaggcatttacagtcctctaatgttgattaatatgtgaaaagaaattgtaccaattttactaaattatgcagtttaaaatggatgattttatgttatgtggatttcatttcaataaaaaaaaactcttatcaaaaaaaaaaaaaaaa

SEQ ID NO: 136 - protein, 168 aa, Homo sapiens
MEYHPDLENLDEDGYTQLHFDSQSNTRIAVVSEKGVLSSPCPPNWIIYEKSCYLFSMSLNSWDGSKRQCWQLGSNLLKIDSSNELGFIVKQVSSQPDNSFWIGLSRPQTEVPWLWEDGSTFSSNLFQIRTTATQENPSPNCVWIHVSVIYDQLCSVPSYSICEKKFSM

SEQ ID NO: 137 - DNA, 519 bp, Homo sapiens
agcatagtttcatttcctgctcttgaatatctggttgaactacttaagcttaatttgttaaactccggtaagtacctagcccacatgatttgactcagagattctcttttgtccacagacagtcatctcaggagcagaaagaaaagagctcccaaatgctatatctattcaggggctctcaagaacaatggaatatcatcctgatttagaaaatttggatgaagatggatatactcaattacacttcgactctcaaagcaataccaggatagctgttgtttcagagaaaggatcgtgtgctgcatctcctccttggcgcctcattgctgtaattttgggaatcctatgcttggtaatactggtgatagctgtggtcctgggtaccatggctggtttcaaagctgtggaattcaaaggataaattaatgaagaaaacaagcggagctgaagaagaaagtacaatatggtgctgtcttcctaatgaaataaattcactaaatggacattaaaaaaaaaaaa

SEQ ID NO: 138 - protein, 77 aa, Homo sapiens
MEYHPDLENLDEDGYTQLHFDSQSNTRIAVVSEKGSCAASPPWRLIAVILGILCLVILVIAVVLGTMAGFKAVEFKG

SEQ ID NO: 139 - DNA, 2144 bp, Mus musculus
tgtttcagggtttgggttagtgagcctcatcctggcagttattttatagtaaagaacattcaagtgctctgcctacctagggccctgtgaagcaatgaaatatcactctcatatagagaatctggatgaagatggatatactcaattagacttcagcactcaagacatccataaaaggcccaggggatcagagaaaggaagccaggctccatcttcaccttggaggcccattgcagtgggtttaggaatcctgtgctttgtggtagtagtggttgctgcagtgctgggtgccctaggaggtttttctcagccttgccttcctaattggatcatgcatgggaagagctgttacctatttagcttctcaggaaattcctggtatggaagtaagagacactgctcccagctaggtgctcatctactgaagatagacaactcaaaagaatttgagttcattgaaagccaaacatcgtctcaccgtattaatgcattttggataggcctttcccgcaatcagagtgaagggccatggttctgggaggatggatcagcattcttccccaactcgtttcaagtcagaaatacagctccccaggaaagcttactgcacaattgtgtatggattcatggatcagaggtctacaaccaaatctgcaatacttcttcatacagtatctgtgagaaggaactgtaaatgtatgtgagaatataaagatggtgtgtgtgtgtgtgtgtgtgtgtgtgtacatgcacacacaccaccaccaccaccactaccaacaacagaacagaacagaacagaacagaacagattaatattaaaaaacagaaaaaatgctgggatgctaagagactttaacctcatttgagaacttggatgaagaagctgagacttttgtacttgtcatcttcacaaagatggtggcactatcttccagttaggaagtcactagacatggagtgagggcagctcaacaatacagagaatatgtgaacctgaggtaccctgactcaaatttcacaaccacaatgaaacccctacactatcaggaaacactgtagaggagtgagactgaagactttaaaagccagagaatcagcctacttactgtggtgttttctagacaggacagggaaagtatatctaggaaataaaaacaatacaattcagcaaacaaaatctgcataatgacaacctcagttggtatggtatgttatggtatggtatgggtgtagaagtttcacaaggccctatgaagaactacagacagttaaatagggggaaagctttttctaggatcaagcctactgaaccccaagaagtcagcactgaacatatgtacagatcagtatcattaaatgaactagtaagacatatacatatatgttaatcaaatattggtaccagagtacacactgtgtttgcatgattttctcagtatctacagtacaccagacacagggagaaggcaaaatgaacttctaaattgagaagtgaaaaaaatgagggaagagaatcttcaccacaaatagggattctattttcacccacatgatcattattaagatggccatcacccaaacgtcgtgacccaagctacttcctcaactagataactcaaagagtctgcccaccttttctgatagcaaatctggtatctagatttcactgtttccttatgctgtctggccagcagtatgacaaaggtgctgccctttcaggaagcagtctccttaaatgctgtagttggaaagataaatcatatctgatagtgaatatttaaaaagcgcccagtcaggataagtgttttggaacacagaacatatttcatctttttatgatacactatcttgcaattaacaaccaattcttaagtcatttctttacaaacatatgactggaatatgactgtttcctagtgtgatctgtcttgttaacttctaagattgtccattaataccacccttatttccagtgtggacttccaaattgctggggatctgtttatagctttctcagactaatcaatatgtgggcagaaattgtgctgagtccactgaattgttctcttgaaaatgattgggtttatgtcactttcatctcaattgaaaaactgcttattaaagtatctttggcctctgaa

SEQ ID NO: 140 - protein, 199 aa, Mus musculus
MKYHSHIENLDEDGYTQLDFSTQDIHKRPRGSEKGSQAPSSPWRPIAVGLGILCFVVVVVAAVLGALGGFSQPCLPNWIMHGKSCYLFSFSGNSWYGSKRHCSQLGAHLLKIDNSKEFEFIESQTSSHRINAFWIGLSRNQSEGPWFWEDGSAFFPNSFQVRNTAPQESLLHNCVWIHGSEVYNQICNTSSYSICEKEL

SEQ ID NO: 141 - DNA, 2279 bp, Mus musculus
tgtttcagggtttgggttagtgagcctcatcctggcagttattttatagtaaagaacattcaagtgctctgcctacctagggccctgtgaagcaatgaaatatcactctcatatagagaatctggatgaagatggatatactcaattagacttcagcactcaagacatccataaaaggcccaggggatcagagaaaggaagccaggctccatcttcaccttggaggcccattgcagtgggtttaggaatcctgtgctttgtggtagtagtggttgctgcagtgctgggtgccctagcattttggcgacacaattcagggagaaatccagaggagaaagacaacttcctatcaagaaataaagagaaccacaagcccacagaatcatctttagatgagaaggtggctccctccaaggcatcccaaactacaggaggtttttctcagccttgccttcctaattggatcatgcatgggaagagctgttacctatttagcttctcaggaaattcctggtatggaagtaagagacactgctcccagctaggtgctcatctactgaagatagacaactcaaaagaatttgagttcattgaaagccaaacatcgtctcaccgtattaatgcattttggataggcctttcccgcaatcagagtgaagggccatggttctgggaggatggatcagcattcttccccaactcgtttcaagtcagaaatacagctccccaggaaagcttactgcacaattgtgtatggattcatggatcagaggtctacaaccaaatctgcaatacttcttcatacagtatctgtgagaaggaactgtaaatgtatgtgagaatataaagatggtgtgtgtgtgtgtgtgtgtgtgtgtgtacatgcacacacaccaccaccaccaccactaccaacaacagaacagaacagaacagaacagaacagattaatattaaaaaacagaaaaaatgctgggatgctaagagactttaacctcatttgagaacttggatgaagaagctgagacttttgtacttgtcatcttcacaaagatggtggcactatcttccagttaggaagtcactagacatggagtgagggcagctcaacaatacagagaatatgtgaacctgaggtaccctgactcaaatttcacaaccacaatgaaacccctacactatcaggaaacactgtagaggagtgagactgaagactttaaaagccagagaatcagcctacttactgtggtgttttctagacaggacagggaaagtatatctaggaaataaaaacaatacaattcagcaaacaaaatctgcataatgacaacctcagttggtatggtatgttatggtatggtatgggtgtagaagtttcacaaggccctatgaagaactacagacagttaaatagggggaaagctttttctaggatcaagcctactgaaccccaagaagtcagcactgaacatatgtacagatcagtatcattaaatgaactagtaagacatatacatatatgttaatcaaatattggtaccagagtacacactgtgtttgcatgattttctcagtatctacagtacaccagacacagggagaaggcaaaatgaacttctaaattgagaagtgaaaaaaatgagggaagagaatcttcaccacaaatagggattctattttcacccacatgatcattattaagatggccatcacccaaacgtcgtgacccaagctacttcctcaactagataactcaaagagtctgcccaccttttctgatagcaaatctggtatctagatttcactgtttccttatgctgtctggccagcagtatgacaaaggtgctgccctttcaggaagcagtctccttaaatgctgtagttggaaagataaatcatatctgatagtgaatatttaaaaagcgcccagtcaggataagtgttttggaacacagaacatatttcatctttttatgatacactatcttgcaattaacaaccaattcttaagtcatttctttacaaacatatgactggaatatgactgtttcctagtgtgatctgtcttgttaacttctaagattgtccattaataccacccttatttccagtgtggacttccaaattgctggggatctgtttatagctttctcagactaatcaatatgtgggcagaaattgtgctgagtccactgaattgttctcttgaaaatgattgggtttatgtcactttcatctcaattgaaaaactgcttattaaagtatctttggcctctgaa

SEQ ID NO: 142 - protein, 244 aa, Mus musculus
MKYHSHIENLDEDGYTQLDFSTQDIHKRPRGSEKGSQAPSSPWRPIAVGLGILCFVVVVVAAVLGALAFWRHNSGRNPEEKDNFLSRNKENHKPTESSLDEKVAPSKASQTTGGFSQPCLPNWIMHGKSCYLFSFSGNSWYGSKRHCSQLGAHLLKIDNSKEFEFIESQTSSHRINAFWIGLSRNQSEGPWFWEDGSAFFPNSFQVRNTAPQESLLHNCVWIHGSEVYNQICNTSSYSICEKEL

SEQ ID NO: 143 - DNA, 2082 bp, Homo sapiens
aaggaataaagttgctgattcattcctttacactgaaaccctttgttgtgccctcctcttccttcctctttatagggagacactctgagaaagagcacattgtgggggcccactccatgtgatgtttgcttggttgcctgttcccttttctacctgcagagcacggttcccataagggcggcgagatcagcctcctgtctcatctggaagaccaccactctggggtctcagaggaatgatggaagccttggggtttctaaaattggaagtgaatggccccatggtgacggtggccctgtcagtggctctcttggccctcctgaaatggtactccacatcagcattctcaagactggagaagttaggcctcagacatcccaagccttctcctttcattggaaacttgacatttttccgccagggtttttgggaaagccaaatggagctcagaaagctgtatggacctctgtgtgggtactatcttggtcgtcggatgtttattgttatttctgagccagacatgatcaagcaggtgttggttgagaacttcagtaactttaccaacagaatggcgtcgggtttggagttcaagtcggtagccgacagcgttctgtttttacgtgacaaaagatgggaagaggtcagaggtgccctgatgtctgctttcagtcctgaaaagctgaacgagatggttcccctcatcagccaagcctgcgaccttctcctggctcatttaaaacgctatgcggaatctggggacgcatttgacatccagaggtgctactgcaattacaccacagatgtggttgccagcgtcgcctttggcaccccggtggactcctggcaggcccctgaggatccctttgtgaaacactgcaagcgtttcttcgaattctgcatccccagacctatcctggttttactcttatcatttccatccataatggtcccactggcccggattttgcccaataagaaccgagacgaactgaatggcttttttaacaaactcattaggaatgtgattgccttgcgggaccagcaagctgccgaagagaggcggagagacttcctccaaatggtcctggatgcccgacattctgcaagtcccatgggcgtgcaagactttgacatcgtcagagacgttttctcctctactgggtgcaagccgaacccttcccggcaacaccagcccagccctatggccaggcctttgactgtggatgagattgtgggccaggccttcatcttcctcatcgctggctatgaaatcatcaccaacacactttcttttgccacctacctactggccaccaaccctgactgccaagagaagcttctgagagaggtagacgtttttaaggagaaacacatggcccctgagttctgcagcctcgaggaaggcctgccctatctggacatggtgattgcagagacgctgaggatgtacccgccagctttcagattcacacgggaggcagctcaggactgcgaggtgctggggcagcgcatccccgcaggcgctgtgctagagatggccgtgggtgccctgcaccatgaccctgagcactggccaagcccggagaccttcaaccctgaaaggttcacggctgaggcccggcagcagcaccggcccttcacgtacctgcccttcggggccggcccacggagctgcctcggggtgcgtctagggctgcttgaggtcaagttgacactgctccacgtgctgcacaagttccggttccaagcctgccctgagacccaggtaccgctgcagctagaatccaaatctgccctaggtccaaaaaatggtgtctatatcaagatcgtatcccgctgacacagaaggctgccgggtggggggagggcacccccaaattcaaagaaaaccctaagtgtggatgttcagaattttggaaaaatgtcactgaagtgattgaaagagtgcctggcatgcaaggataagaggttctttacataacatttcctaaatgcttaataaacgtttgttgcacttggttttgacattgccaatggggtttgaaccagtgctctctctaaatgaaaaaaaaaaaaaaaaaa

SEQ ID NO: 144 - protein, 534 aa, Homo sapiens
MMEALGFLKLEVNGPMVTVALSVALLALLKWYSTSAFSRLEKLGLRHPKPSPFIGNLTFFRQGFWESQMELRKLYGPLCGYYLGRRMFIVISEPDMIKQVLVENFSNFTNRMASGLEFKSVADSVLFLRDKRWEEVRGALMSAFSPEKLNEMVPLISQACDLLLAHLKRYAESGDAFDIQRCYCNYTTDVVASVAFGTPVDSWQAPEDPFVKHCKRFFEFCIPRPILVLLLSFPSIMVPLARILPNKNRDELNGFFNKLIRNVIALRDQQAAEERRRDFLQMVLDARHSASPMGVQDFDIVRDVFSSTGCKPNPSRQHQPSPMARPLTVDEIVGQAFIFLIAGYEIITNTLSFATYLLATNPDCQEKLLREVDVFKEKHMAPEFCSLEEGLPYLDMVIAETLRMYPPAFRFTREAAQDCEVLGQRIPAGAVLEMAVGALHHDPEHWPSPETFNPERFTAEARQQHRPFTYLPFGAGPRSCLGVRLGLLEVKLTLLHVLHKFRFQACPETQVPLQLESKSALGPKNGVYIKIVSR

SEQ ID NO: 145 - DNA, 1919 bp, Homo sapiens
aaggaataaagttgctgattcattcctttacactgaaaccctttgttgtgccctcctcttccttcctctttatagggagacactctgagaaagagcacattgtgggggcccactccatgtgatgtttgcttggttgcctgttcccttttctacctgcagagcacggttcccataagggcggcgagatcagcctcctgtctcatctggaagaccaccactctggggtctcagaggaatgatggaagccttggggtttctaaaattggaagtgaatggccccatggtgacggtggccctgtcagtggctctcttggccctcctgaaatggtactccacatcagcattctcaagactggagaagttaggcctcagacatcccaagccttctcctttcattggaaacttgacatttttccgccagggtttttgggaaagccaaatggagctcagaaagctgtatggacctctgtgtgggtactatcttggtcgtcggatgtttattgttatttctgagccagacatgatcaagcaggtgttggttgagaacttcagtaactttaccaacagaatggcgtcgggtttggagttcaagtcggtagccgacagcgttctgtttttacgtgacaaaagatgggaagaggtcagaggtgccctgatgtctgctttcagtcctgaaaagctgaacgagatggttcccctcatcagccaagcctgcgaccttctcctggctcatttaaaacgctatgcggaatctggggacgcatttgacatccagaggtgctactgcaattacaccacagatgtggttgccagcgtcgcctttggcaccccggtggactcctggcaggcccctgaggatccctttgtgaaacactgcaagcgtttcttcgaattctgcatccccagacctatcctggttttactcttatcatttccatccataatggtcccactggcccggattttgcccaataagaaccgagacgaactgaatggcttttttaacaaactcattaggaatgtgattgccttgcgggaccagcaagctgccgaagagaggcggagagacttcctccaaatggtcctggatgcccgacattctgcaagtcccatgggcgtgcaagactttgacatcgtcagagacgttttctcctctactgggtgcaagccgaacccttcccggcaacaccagcccagccctatggccaggcctttgactgtggatgagattgtgggccaggccttcatcttcctcatcgctggctatgaaatcatcaccaacacactttcttttgccacctacctactggccaccaaccctgactgccaagagaagcttctgagagaggtagacgtttttaaggagaaacacatggcccctgagttctgcagcctcgaggaaggcctgccctatctggacatggtgattgcagagacgctgaggatgtacccgccagctttcagattcacacgggaggcagctcaggactgcgaggtgctggggcagcgcatccccgcaggcgctgtgctagagatggccgtgggtgccctgcaccatgaccctgagcactggccaagcccggagaccttcaaccctgaaaggtaccgctgcagctagaatccaaatctgccctaggtccaaaaaatggtgtctatatcaagatcgtatcccgctgacacagaaggctgccgggtggggggagggcacccccaaattcaaagaaaaccctaagtgtggatgttcagaattttggaaaaatgtcactgaagtgattgaaagagtgcctggcatgcaaggataagaggttctttacataacatttcctaaatgcttaataaacgtttgttgcacttggttttgacattgccaatggggtttgaaccagtgctctctctaaatgaaaaaaaaaaaaaaaaaa

SEQ ID NO: 146 - protein, 460 aa, Homo sapiens
MMEALGFLKLEVNGPMVTVALSVALLALLKWYSTSAFSRLEKLGLRHPKPSPFIGNLTFFRQGFWESQMELRKLYGPLCGYYLGRRMFIVISEPDMIKQVLVENFSNFTNRMASGLEFKSVADSVLFLRDKRWEEVRGALMSAFSPEKLNEMVPLISQACDLLLAHLKRYAESGDAFDIQRCYCNYTTDVVASVAFGTPVDSWQAPEDPFVKHCKRFFEFCIPRPILVLLLSFPSIMVPLARILPNKNRDELNGFFNKLIRNVIALRDQQAAEERRRDFLQMVLDARHSASPMGVQDFDIVRDVFSSTGCKPNPSRQHQPSPMARPLTVDEIVGQAFIFLIAGYEIITNTLSFATYLLATNPDCQEKLLREVDVFKEKHMAPEFCSLEEGLPYLDMVIAETLRMYPPAFRFTREAAQDCEVLGQRIPAGAVLEMAVGALHHDPEHWPSPETFNPERYRCS

SEQ ID NO: 147 - DNA, 2385 bp, Homo sapiens
gagggccggcctggacccggcgggcgcacggctccgagcccagcgcagccgagccggtctgcagaggggcccccagaactttgtgtgtgtgtgtgcacgcgcgcgcgtgtgtgcccaggtgcgagggttcgcgcgtgtgctggcggggagggaaccgacccgaaagagagccccacgctggcaaagtggctcgcccatctcacagccggttggcgctcgcggaggctcacagaacatttcctgcctgttgctcacactctgttgtccacagcatacccgcaccctagatggctgactcttgtcttctgtctctttattttccatgtgtgagcctgtgcctgtggtttatctctggaggatgtgcctgagggaggagacatatactgcctggactgcctggctgatgtgagctagtttgtctggttgagttggatgtttaaatagaaggcagaacaacaacagagcacggttcccataagggcggcgagatcagcctcctgtctcatctggaagaccaccactctggggtctcagaggaatgatggaagccttggggtttctaaaattggaagtgaatggccccatggtgacggtggccctgtcagtggctctcttggccctcctgaaatggtactccacatcagcattctcaagactggagaagttaggcctcagacatcccaagccttctcctttcattggaaacttgacatttttccgccagggtttttgggaaagccaaatggagctcagaaagctgtatggacctctgtgtgggtactatcttggtcgtcggatgtttattgttatttctgagccagacatgatcaagcaggtgttggttgagaacttcagtaactttaccaacagaatggcgtcgggtttggagttcaagtcggtagccgacagcgttctgtttttacgtgacaaaagatgggaagaggtcagaggtgccctgatgtctgctttcagtcctgaaaagctgaacgagatggttcccctcatcagccaagcctgcgaccttctcctggctcatttaaaacgctatgcggaatctggggacgcatttgacatccagaggtgctactgcaattacaccacagatgtggttgccagcgtcgcctttggcaccccggtggactcctggcaggcccctgaggatccctttgtgaaacactgcaagcgtttcttcgaattctgcatccccagacctatcctggttttactcttatcatttccatccataatggtcccactggcccggattttgcccaataagaaccgagacgaactgaatggcttttttaacaaactcattaggaatgtgattgccttgcgggaccagcaagctgccgaagagaggcggagagacttcctccaaatggtcctggatgcccgacattctgcaagtcccatgggcgtgcaagactttgacatcgtcagagacgttttctcctctactgggtgcaagccgaacccttcccggcaacaccagcccagccctatggccaggcctttgactgtggatgagattgtgggccaggccttcatcttcctcatcgctggctatgaaatcatcaccaacacactttcttttgccacctacctactggccaccaaccctgactgccaagagaagcttctgagagaggtagacgtttttaaggagaaacacatggcccctgagttctgcagcctcgaggaaggcctgccctatctggacatggtgattgcagagacgctgaggatgtacccgccagctttcagattcacacgggaggcagctcaggactgcgaggtgctggggcagcgcatccccgcaggcgctgtgctagagatggccgtgggtgccctgcaccatgaccctgagcactggccaagcccggagaccttcaaccctgaaaggttcacggctgaggcccggcagcagcaccggcccttcacgtacctgcccttcggggccggcccacggagctgcctcggggtgcgtctagggctgcttgaggtcaagttgacactgctccacgtgctgcacaagttccggttccaagcctgccctgagacccaggtaccgctgcagctagaatccaaatctgccctaggtccaaaaaatggtgtctatatcaagatcgtatcccgctgacacagaaggctgccgggtggggggagggcacccccaaattcaaagaaaaccctaagtgtggatgttcagaattttggaaaaatgtcactgaagtgattgaaagagtgcctggcatgcaaggataagaggttctttacataacatttcctaaatgcttaataaacgtttgttgcacttggttttgacattgccaatggggtttgaaccagtgctctctctaaatgaaaaaaaaaaaaaaaaaa

SEQ ID NO: 148 - DNA, 2220 bp, Homo sapiens
aaggaataaagttgctgattcattcctttacactgaaaccctttgttgtgccctcctcttccttcctctttatagggagacactctgagaaagagcacattgtgggggcccactccatgtgatgtttgcttggttgcctgttcccttttctacctgcagagcacggttcccataagggcggcgagatcagcctcctgtctcatctggaagaccaccactctggggtctcagaggaatgatggaagccttggggtttctaaaattggaagtgaatggccccatggtgacggtggccctgtcagtggctctcttggccctcctgaaatggtactccacatcagcattctcaagactggagaagttaggcctcagacatcccaagccttctcctttcattggaaacttgacatttttccgccagggtttttgggaaagccaaatggagctcagaaagctgtatggacctctgtgtgggtactatcttggtcgtcggatgtttattgttatttctgagccagacatgatcaagcaggtgttggttgagaacttcagtaactttaccaacagaatggcgtcgggtttggagttcaagtcggtagccgacagcgttctgtttttacgtgacaaaagatgggaagaggtcagaggtgccctgatgtctgctttcagtcctgaaaagctgaacgagcttggccttttaatcatgcaagagagaataaaaggtcacatgggtggccagcaggctccacaaagaattccacccacccgtttgtcgaagccgagtggtatctatgtgaatctccattatgccactctacctttctgtatggttcccctcatcagccaagcctgcgaccttctcctggctcatttaaaacgctatgcggaatctggggacgcatttgacatccagaggtgctactgcaattacaccacagatgtggttgccagcgtcgcctttggcaccccggtggactcctggcaggcccctgaggatccctttgtgaaacactgcaagcgtttcttcgaattctgcatccccagacctatcctggttttactcttatcatttccatccataatggtcccactggcccggattttgcccaataagaaccgagacgaactgaatggcttttttaacaaactcattaggaatgtgattgccttgcgggaccagcaagctgccgaagagaggcggagagacttcctccaaatggtcctggatgcccgacattctgcaagtcccatgggcgtgcaagactttgacatcgtcagagacgttttctcctctactgggtgcaagccgaacccttcccggcaacaccagcccagccctatggccaggcctttgactgtggatgagattgtgggccaggccttcatcttcctcatcgctggctatgaaatcatcaccaacacactttcttttgccacctacctactggccaccaaccctgactgccaagagaagcttctgagagaggtagacgtttttaaggagaaacacatggcccctgagttctgcagcctcgaggaaggcctgccctatctggacatggtgattgcagagacgctgaggatgtacccgccagctttcagattcacacgggaggcagctcaggactgcgaggtgctggggcagcgcatccccgcaggcgctgtgctagagatggccgtgggtgccctgcaccatgaccctgagcactggccaagcccggagaccttcaaccctgaaaggttcacggctgaggcccggcagcagcaccggcccttcacgtacctgcccttcggggccggcccacggagctgcctcggggtgcgtctagggctgcttgaggtcaagttgacactgctccacgtgctgcacaagttccggttccaagcctgccctgagacccaggtaccgctgcagctagaatccaaatctgccctaggtccaaaaaatggtgtctatatcaagatcgtatcccgctgacacagaaggctgccgggtggggggagggcacccccaaattcaaagaaaaccctaagtgtggatgttcagaattttggaaaaatgtcactgaagtgattgaaagagtgcctggcatgcaaggataagaggttctttacataacatttcctaaatgcttaataaacgtttgttgcacttggttttgacattgccaatggggtttgaaccagtgctctctctaaatgaaaaaaaaaaaaaaaaaa

SEQ ID NO: 149 - protein, 580 aa, Homo sapiens
MMEALGFLKLEVNGPMVTVALSVALLALLKWYSTSAFSRLEKLGLRHPKPSPFIGNLTFFRQGFWESQMELRKLYGPLCGYYLGRRMFIVISEPDMIKQVLVENFSNFTNRMASGLEFKSVADSVLFLRDKRWEEVRGALMSAFSPEKLNELGLLIMQERIKGHMGGQQAPQRIPPTRLSKPSGIYVNLHYATLPFCMVPLISQACDLLLAHLKRYAESGDAFDIQRCYCNYTTDVVASVAFGTPVDSWQAPEDPFVKHCKRFFEFCIPRPILVLLLSFPSIMVPLARILPNKNRDELNGFFNKLIRNVIALRDQQAAEERRRDFLQMVLDARHSASPMGVQDFDIVRDVFSSTGCKPNPSRQHQPSPMARPLTVDEIVGQAFIFLIAGYEIITNTLSFATYLLATNPDCQEKLLREVDVFKEKHMAPEFCSLEEGLPYLDMVIAETLRMYPPAFRFTREAAQDCEVLGQRIPAGAVLEMAVGALHHDPEHWPSPETFNPERFTAEARQQHRPFTYLPFGAGPRSCLGVRLGLLEVKLTLLHVLHKFRFQACPETQVPLQLESKSALGPKNGVYIKIVSR

SEQ ID NO: 150 - DNA, 2132 bp, Homo sapiens
gagggccggcctggacccggcgggcgcacggctccgagcccagcgcagccgagccggtctgcagaggggcccccagaactttgtgtgtgtgtgtgcacgcgcgcgcgtgtgtgcccaggtgcgagggttcgcgcgtgtgctggcggggagggaaccgacccgaaagagagccccacgctggcaaagtggctcgcccatctcacagccggttggcgctcgcggagctctttattttccatgtgtgagcctgtgcctgtggtttatctctggaggatgtgcctgagggaggagacatatactgcctggactgcctggctgatgtgagctagtttgtctggttgagttggatgtttaaatagaaggcagaacaacaacaggtactccacatcagcattctcaagactggagaagttaggcctcagacatcccaagccttctcctttcattggaaacttgacatttttccgccagggtttttgggaaagccaaatggagctcagaaagctgtatggacctctgtgtgggtactatcttggtcgtcggatgtttattgttatttctgagccagacatgatcaagcaggtgttggttgagaacttcagtaactttaccaacagaatggcgtcgggtttggagttcaagtcggtagccgacagcgttctgtttttacgtgacaaaagatgggaagaggtcagaggtgccctgatgtctgctttcagtcctgaaaagctgaacgagatggttcccctcatcagccaagcctgcgaccttctcctggctcatttaaaacgctatgcggaatctggggacgcatttgacatccagaggtgctactgcaattacaccacagatgtggttgccagcgtcgcctttggcaccccggtggactcctggcaggcccctgaggatccctttgtgaaacactgcaagcgtttcttcgaattctgcatccccagacctatcctggttttactcttatcatttccatccataatggtcccactggcccggattttgcccaataagaaccgagacgaactgaatggcttttttaacaaactcattaggaatgtgattgccttgcgggaccagcaagctgccgaagagaggcggagagacttcctccaaatggtcctggatgcccgacattctgcaagtcccatgggcgtgcaagactttgacatcgtcagagacgttttctcctctactgggtgcaagccgaacccttcccggcaacaccagcccagccctatggccaggcctttgactgtggatgagattgtgggccaggccttcatcttcctcatcgctggctatgaaatcatcaccaacacactttcttttgccacctacctactggccaccaaccctgactgccaagagaagcttctgagagaggtagacgtttttaaggagaaacacatggcccctgagttctgcagcctcgaggaaggcctgccctatctggacatggtgattgcagagacgctgaggatgtacccgccagctttcagattcacacgggaggcagctcaggactgcgaggtgctggggcagcgcatccccgcaggcgctgtgctagagatggccgtgggtgccctgcaccatgaccctgagcactggccaagcccggagaccttcaaccctgaaaggttcacggctgaggcccggcagcagcaccggcccttcacgtacctgcccttcggggccggcccacggagctgcctcggggtgcgtctagggctgcttgaggtcaagttgacactgctccacgtgctgcacaagttccggttccaagcctgccctgagacccaggtaccgctgcagctagaatccaaatctgccctaggtccaaaaaatggtgtctatatcaagatcgtatcccgctgacacagaaggctgccgggtggggggagggcacccccaaattcaaagaaaaccctaagtgtggatgttcagaattttggaaaaatgtcactgaagtgattgaaagagtgcctggcatgcaaggataagaggttctttacataacatttcctaaatgcttaataaacgtttgttgcacttggttttgacattgccaatggggtttgaaccagtgctctctctaaatgaaaaaaaaaaaaaaaaaa

SEQ ID NO: 151 - protein, 466 aa, Homo sapiens
MELRKLYGPLCGYYLGRRMFIVISEPDMIKQVLVENFSNFTNRMASGLEFKSVADSVLFLRDKRWEEVRGALMSAFSPEKLNEMVPLISQACDLLLAHLKRYAESGDAFDIQRCYCNYTTDVVASVAFGTPVDSWQAPEDPFVKHCKRFFEFCIPRPILVLLLSFPSIMVPLARILPNKNRDELNGFFNKLIRNVIALRDQQAAEERRRDFLQMVLDARHSASPMGVQDFDIVRDVFSSTGCKPNPSRQHQPSPMARPLTVDEIVGQAFIFLIAGYEIITNTLSFATYLLATNPDCQEKLLREVDVFKEKHMAPEFCSLEEGLPYLDMVIAETLRMYPPAFRFTREAAQDCEVLGQRIPAGAVLEMAVGALHHDPEHWPSPETFNPERFTAEARQQHRPFTYLPFGAGPRSCLGVRLGLLEVKLTLLHVLHKFRFQACPETQVPLQLESKSALGPKNGVYIKIVSR

SEQ ID NO: 152 - DNA, 2111 bp, Homo sapiens
aaggaataaagttgctgattcattcctttacactgaaaccctttgttgtgccctcctcttccttcctctttatagggagacactctgagaaagagcacattgtgggggcccactccatgtgatgtttgcttggttgcctgttcccttttctacctgcagagcacggttcccataagggcggcgagatcagcctcctgtctcatctggaagaccaccactctggggtctcagaggaatgatggaagccttggggtttctaaaattggaagtgaatggccccatggtgacggtggccctgtcagtggctctcttggccctcctgaaatggtactccacatcagcattctcaagactggagaagttaggcctcagacatcccaagccttctcctttcattggaaacttgacatttttccgccagggtttttgggaaagccaaatggagctcagaaagctgtatggacctctgtgtgggtaagaaggaaactcaacgtttctattatgtactatcttggtcgtcggatgtttattgttatttctgagccagacatgatcaagcaggtgttggttgagaacttcagtaactttaccaacagaatggcgtcgggtttggagttcaagtcggtagccgacagcgttctgtttttacgtgacaaaagatgggaagaggtcagaggtgccctgatgtctgctttcagtcctgaaaagctgaacgagatggttcccctcatcagccaagcctgcgaccttctcctggctcatttaaaacgctatgcggaatctggggacgcatttgacatccagaggtgctactgcaattacaccacagatgtggttgccagcgtcgcctttggcaccccggtggactcctggcaggcccctgaggatccctttgtgaaacactgcaagcgtttcttcgaattctgcatccccagacctatcctggttttactcttatcatttccatccataatggtcccactggcccggattttgcccaataagaaccgagacgaactgaatggcttttttaacaaactcattaggaatgtgattgccttgcgggaccagcaagctgccgaagagaggcggagagacttcctccaaatggtcctggatgcccgacattctgcaagtcccatgggcgtgcaagactttgacatcgtcagagacgttttctcctctactgggtgcaagccgaacccttcccggcaacaccagcccagccctatggccaggcctttgactgtggatgagattgtgggccaggccttcatcttcctcatcgctggctatgaaatcatcaccaacacactttcttttgccacctacctactggccaccaaccctgactgccaagagaagcttctgagagaggtagacgtttttaaggagaaacacatggcccctgagttctgcagcctcgaggaaggcctgccctatctggacatggtgattgcagagacgctgaggatgtacccgccagctttcagattcacacgggaggcagctcaggactgcgaggtgctggggcagcgcatccccgcaggcgctgtgctagagatggccgtgggtgccctgcaccatgaccctgagcactggccaagcccggagaccttcaaccctgaaaggttcacggctgaggcccggcagcagcaccggcccttcacgtacctgcccttcggggccggcccacggagctgcctcggggtgcgtctagggctgcttgaggtcaagttgacactgctccacgtgctgcacaagttccggttccaagcctgccctgagacccaggtaccgctgcagctagaatccaaatctgccctaggtccaaaaaatggtgtctatatcaagatcgtatcccgctgacacagaaggctgccgggtggggggagggcacccccaaattcaaagaaaaccctaagtgtggatgttcagaattttggaaaaatgtcactgaagtgattgaaagagtgcctggcatgcaaggataagaggttctttacataacatttcctaaatgcttaataaacgtttgttgcacttggttttgacattgccaatggggtttgaaccagtgctctctctaaatgaaaaaaaaaaaaaaaaaa

SEQ ID NO: 153 - protein, 514 aa, Homo sapiens
MVLHISILKTGEVRPQTSQAFSFHWKLDIFPPGFLGKPNGAQKAVWTSVWVRRKLNVSIMYYLGRRMFIVISEPDMIKQVLVENFSNFTNRMASGLEFKSVADSVLFLRDKRWEEVRGALMSAFSPEKLNEMVPLISQACDLLLAHLKRYAESGDAFDIQRCYCNYTTDVVASVAFGTPVDSWQAPEDPFVKHCKRFFEFCIPRPILVLLLSFPSIMVPLARILPNKNRDELNGFFNKLIRNVIALRDQQAAEERRRDFLQMVLDARHSASPMGVQDFDIVRDVFSSTGCKPNPSRQHQPSPMARPLTVDEIVGQAFIFLIAGYEIITNTLSFATYLLATNPDCQEKLLREVDVFKEKHMAPEFCSLEEGLPYLDMVIAETLRMYPPAFRFTREAAQDCEVLGQRIPAGAVLEMAVGALHHDPEHWPSPETFNPERFTAEARQQHRPFTYLPFGAGPRSCLGVRLGLLEVKLTLLHVLHKFRFQACPETQVPLQLESKSALGPKNGVYIKIVSR

SEQ ID NO: 154 - DNA, 1992 bp, Mus musculus
gcacactctaagaaagagcacttttgggggactcacttgatgggatgttcagctgactacctacttctttctccaccacctatatacagatcaggactcctataagggcaggagagcagcaccctctttcctcctgaggaccacccctccggggtctccgaggaaaaatggaagtgttggggcttctcaagtttgaagtcagtggtaccatagtgactgtgactctgctcgtggctctcttggccctcctgaaatggtactccatgtcagctttctcaagactggagaagttgggcatcaggcaccccaagccttctccttttgttggaaacttgatgtttttccgccagggtttttgggagagccaattggaactccgagagcgatacgggcctctgtgtgggtactatcttggccgtcggatgcacgttgtcatttcagagccagacatgatcaagcaggtgttggttgagaacttcagtaacttttccaacagaatggcctcaggtctggaacccaagatggtagcagacagtgtcctgttgttacgtgacagaagatgggaggaagtcaggggtgccctgatgtcttcattcagtcctgaaaagttggatgagatgacacctctcatcagccaagcctgtgaacttctcgtggctcacttaaaacgctatgcagcatccagggacgcattcaacatccagaggtgttactgctgttacaccatagatgtggtggccagtgtggcctttggcacccaggtggactcccagaattctccagaagatccctttgtgcaacactgccggcgtgcttccaccttctgtatccccaggcctctcctggtattaatcttatcatttccatccataatggtcccattggcccggattctgcccaataagaaccgagatgaactgaatggcttttttaacacactcattaggaatgtgattgccttacgggaccagcaagcagcagaagagaggcggagagacttcctgcagatggtgctggatgcccagcactccatgaactctgtgggcgtggaaggctttgacatggtcccagaatccctgtcctcttctgagtgcacaaaggaaccaccccaaaggtgccatcctacctccacatctaagcctttcactgtggatgaaattgtgggccaggccttcctcttcctcattgcgggccatgaggtcatcacaaacacgctgtccttcatcacatacctgctggccacccaccctgactgccaggagaggcttctgaaagaggtggacctcttcatggggaagcacccagcccctgagtaccacagcctgcaggaaggtctgccgtatctggacatggtgatttcagagaccctgaggatgtacccaccagctttcaggttcacacgggaggcagcacaggactgtgaggtgctgggacaacgtatccctgcaggtacagtgctggagatagctgtgggtgccctacaccatgacccagagcactggccgaatcctgagacctttgaccctgaaaggttcacagcagaggcccggcttcagcggaggccgttcacatacctgccctttggagctggccccaggagctgcctcggagtgcggctgggcctgctggtggtcaagctgacaatactccaggtcctacacaagttccgctttgaagccagccctgagactcaggttccacttcagctagaatccaaatctgccctaggccccaaaaatggagtctacatcaagattgtgtcacgctgatatagaaggcacgtgggaaagaggaagcactttgtaatggtaacatctgcacatcgctgcaggagggcacccgggattcagatgaaagcctcgtgtggagatggagagtttataggaatatatatcttagggtgatcaaaagggcacatggcatgtgagcctactttgtcacaattcctaaatgtttaataaatgtttaccatgcttcaaaaaaaaaaaaaaa

SEQ ID NO: 155 - protein, 533 aa, Mus musculus
MEVLGLLKFEVSGTIVTVTLLVALLALLKWYSMSAFSRLEKLGIRHPKPSPFVGNLMFFRQGFWESQLELRERYGPLCGYYLGRRMHVVISEPDMIKQVLVENFSNFSNRMASGLEPKMVADSVLLLRDRRWEEVRGALMSSFSPEKLDEMTPLISQACELLVAHLKRYAASRDAFNIQRCYCCYTIDVVASVAFGTQVDSQNSPEDPFVQHCRRASTFCIPRPLLVLILSFPSIMVPLARILPNKNRDELNGFFNTLIRNVIALRDQQAAEERRRDFLQMVLDAQHSMNSVGVEGFDMVPESLSSSECTKEPPQRCHPTSTSKPFTVDEIVGQAFLFLIAGHEVITNTLSFITYLLATHPDCQERLLKEVDLFMGKHPAPEYHSLQEGLPYLDMVISETLRMYPPAFRFTREAAQDCEVLGQRIPAGTVLEIAVGALHHDPEHWPNPETFDPERFTAEARLQRRPFTYLPFGAGPRSCLGVRLGLLVVKLTILQVLHKFRFEASPETQVPLQLESKSALGPKNGVYIKIVSR

SEQ ID NO: 156 - DNA, 1769 bp, Homo sapiens
gcagttcctgagagaagaaccctgaggaacagacgttccctcgcggccctggcacctccaaccccagatatgctgctgctgctgctgctgcccctgctctgggggagggagagggtggaaggacagaagagtaaccggaaggattactcgctgacgatgcagagttccgtgaccgtgcaagagggcatgtgtgtccatgtgcgctgctccttctcctacccagtggacagccagactgactctgacccagttcatggctactggttccgggcagggaatgatataagctggaaggctccagtggccacaaacaacccagcttgggcagtgcaggaggaaactcgggaccgattccacctccttggggacccacagaccaaaaattgcaccctgagcatcagagatgccagaatgagtgatgcggggagatacttctttcgtatggagaaaggaaatataaaatggaattataaatatgaccagctctctgtgaacgtgacagccttgacccacaggcccaacatccttatccccggtaccctggagtctggctgcttccagaatctgacctgctctgtgccctgggcctgtgagcaggggacgccccctatgatctcctggatggggacctctgtgtcccccctgcacccctccaccacccgctcctcagtgctcaccctcatcccacagccccagcaccacggcaccagcctcacctgtcaggtgaccttgcctggggccggcgtgaccacgaacaggaccatccaactcaatgtgtcctaccctcctcagaacttgactgtgactgtcttccaaggagaaggcacagcatccacagctctggggaacagctcatctctttcagtcctagagggccagtctctgcgcttggtctgtgctgttgacagcaatccccctgccaggctgagctggacctggaggagtctgaccctgtacccctcacagccctcaaaccctctggtactggagctgcaagtgcacctgggggatgaaggggaattcacctgtcgagctcagaactctctgggttcccagcacgtttccctgaacctctccctgcaacaggagtacacaggcaaaatgaggcctgtatcaggagtgttgctgggggcggtcgggggagctggagccacagccctggtcttcctctccttctgtgtcatcttcattgtagtgaggtcctgcaggaagaaatcggcaaggccagcagcggacgtgggagacataggcatgaaggatgcaaacaccatcaggggctcagcctctcagggtaacctgactgagtcctgggcagatgataacccccgacaccatggcctggctgcccactcctcaggggaggaaagagagatccagtatgcacccctcagctttcataagggggagcctcaggacctatcaggacaagaagccaccaacaatgagtactcagagatcaagatccccaagtaagaaaatgcagaggctcgggcttgtttgagggttcacgacccctccagcaaaggagtctgaggctgattccagtagaattagcagccctcaatgctgtgcaacaagacatcagaacttattcctcttgtctaactgaaaatgcatgcctgatgaccaaactctccctttccccatccaatcggtccacactccccgccctggcctctggtacccaccattctcctctgtacttctctaaggatgactactttagattccgaatatagtgagattgtaacgtgaaaaaaaaaaaaaaa

SEQ ID NO: 157 - protein, 467 aa, Homo sapiens
MLLLLLLPLLWGRERVEGQKSNRKDYSLTMQSSVTVQEGMCVHVRCSFSYPVDSQTDSDPVHGYWFRAGNDISWKAPVATNNPAWAVQEETRDRFHLLGDPQTKNCTLSIRDARMSDAGRYFFRMEKGNIKWNYKYDQLSVNVTALTHRPNILIPGTLESGCFQNLTCSVPWACEQGTPPMISWMGTSVSPLHPSTTRSSVLTLIPQPQHHGTSLTCQVTLPGAGVTTNRTIQLNVSYPPQNLTVTVFQGEGTASTALGNSSSLSVLEGQSLRLVCAVDSNPPARLSWTWRSLTLYPSQPSNPLVLELQVHLGDEGEFTCRAQNSLGSQHVSLNLSLQQEYTGKMRPVSGVLLGAVGGAGATALVFLSFCVIFIVVRSCRKKSARPAADVGDIGMKDANTIRGSASQGNLTESWADDNPRHHGLAAHSSGEEREIQYAPLSFHKGEPQDLSGQEATNNEYSEIKIPK

SEQ ID NO: 158 - DNA, 1490 bp, Homo sapiens
gcagttcctgagagaagaaccctgaggaacagacgttccctcgcggccctggcacctccaaccccagatatgctgctgctgctgctgctgcccctgctctgggggagggagagggtggaaggacagaagagtaaccggaaggattactcgctgacgatgcagagttccgtgaccgtgcaagagggcatgtgtgtccatgtgcgctgctccttctcctacccagtggacagccagactgactctgacccagttcatggctactggttccgggcagggaatgatataagctggaaggctccagtggccacaaacaacccagcttgggcagtgcaggaggaaactcgggaccgattccacctccttggggacccacagaccaaaaattgcaccctgagcatcagagatgccagaatgagtgatgcggggagatacttctttcgtatggagaaaggaaatataaaatggaattataaatatgaccagctctctgtgaacgtgacagaccctcctcagaacttgactgtgactgtcttccaaggagaaggcacagcatccacagctctggggaacagctcatctctttcagtcctagagggccagtctctgcgcttggtctgtgctgttgacagcaatccccctgccaggctgagctggacctggaggagtctgaccctgtacccctcacagccctcaaaccctctggtactggagctgcaagtgcacctgggggatgaaggggaattcacctgtcgagctcagaactctctgggttcccagcacgtttccctgaacctctccctgcaacaggagtacacaggcaaaatgaggcctgtatcaggagtgttgctgggggcggtcgggggagctggagccacagccctggtcttcctctccttctgtgtcatcttcattgtagtgaggtcctgcaggaagaaatcggcaaggccagcagcggacgtgggagacataggcatgaaggatgcaaacaccatcaggggctcagcctctcagggtaacctgactgagtcctgggcagatgataacccccgacaccatggcctggctgcccactcctcaggggaggaaagagagatccagtatgcacccctcagctttcataagggggagcctcaggacctatcaggacaagaagccaccaacaatgagtactcagagatcaagatccccaagtaagaaaatgcagaggctcgggcttgtttgagggttcacgacccctccagcaaaggagtctgaggctgattccagtagaattagcagccctcaatgctgtgcaacaagacatcagaacttattcctcttgtctaactgaaaatgcatgcctgatgaccaaactctccctttccccatccaatcggtccacactccccgccctggcctctggtacccaccattctcctctgtacttctctaaggatgactactttagattccgaatatagtgagattgtaacgtgaaaaaaaaaaaaaaa

SEQ ID NO: 159 - protein, 374 aa, Homo sapiens
MLLLLLLPLLWGRERVEGQKSNRKDYSLTMQSSVTVQEGMCVHVRCSFSYPVDSQTDSDPVHGYWFRAGNDISWKAPVATNNPAWAVQEETRDRFHLLGDPQTKNCTLSIRDARMSDAGRYFFRMEKGNIKWNYKYDQLSVNVTDPPQNLTVTVFQGEGTASTALGNSSSLSVLEGQSLRLVCAVDSNPPARLSWTWRSLTLYPSQPSNPLVLELQVHLGDEGEFTCRAQNSLGSQHVSLNLSLQQEYTGKMRPVSGVLLGAVGGAGATALVFLSFCVIFIVVRSCRKKSARPAADVGDIGMKDANTIRGSASQGNLTESWADDNPRHHGLAAHSSGEEREIQYAPLSFHKGEPQDLSGQEATNNEYSEIKIPK

SEQ ID NO: 160 - DNA, 981 bp, Homo sapiens
gcagttcctgagagaagaaccctgaggaacagacgttccctcgcggccctggcacctccaaccccagatatgctgctgctgctgctgctgcccctgctctgggggagggagagggtggaaggacagaagagtaaccggaaggattactcgctgacgatgcagagttccgtgaccgtgcaagagggcatgtgtgtccatgtgcgctgctccttctcctacccagtggacagccagactgactctgacccagttcatggctactggttccgggcagggaatgatataagctggaaggctccagtggccacaaacaacccagcttgggcagtgcaggaggaaactcgggaccgattccacctccttggggacccacagaccaaaaattgcaccctgagcatcagagatgccagaatgagtgatgcggggagatacttctttcgtatggagaaaggaaatataaaatggaattataaatatgaccagctctctgtgaacgtgacagggtaacctgactgagtcctgggcagatgataacccccgacaccatggcctggctgcccactcctcaggggaggaaagagagatccagtatgcacccctcagctttcataagggggagcctcaggacctatcaggacaagaagccaccaacaatgagtactcagagatcaagatccccaagtaagaaaatgcagaggctcgggcttgtttgagggttcacgacccctccagcaaaggagtctgaggctgattccagtagaattagcagccctcaatgctgtgcaacaagacatcagaacttattcctcttgtctaactgaaaatgcatgcctgatgaccaaactctccctttccccatccaatcggtccacactccccgccctggcctctggtacccaccattctcctctgtacttctctaaggatgactactttagattccgaatatagtgagattgtaacgtgaaaaaaaaaaaaaaa

SEQ ID NO: 161 - protein, 145 aa, Homo sapiens
MLLLLLLPLLWGRERVEGQKSNRKDYSLTMQSSVTVQEGMCVHVRCSFSYPVDSQTDSDPVHGYWFRAGNDISWKAPVATNNPAWAVQEETRDRFHLLGDPQTKNCTLSIRDARMSDAGRYFFRMEKGNIKWNYKYDQLSVNVTG

SEQ ID NO: 162 - protein, 1830 aa, Homo sapiens
MAPWRKADKERHGVAIYNFQGSGAPQLSLQIGDVVRIQETCGDWYRGYLIKHKMLQGIFPKSFIHIKEVTVEKRRNTENIIPAEIPLAQEVTTTLWEWGSIWKQLYVASKKERFLQVQSMMYDLMEWRSQLLSGTLPKDELKELKQKVTSKIDYGNKILELDLIVRDEDGNILDPDNTSVISLFHAHEEATDKITERIKEEMSKDQPDYAMYSRISSSPTHSLYVFVRNFVCRIGEDAELFMSLYDPNKQTVISENYLVRWGSRGFPKEIEMLNNLKVVFTDLGNKDLNRDKIYLICQIVRVGKMDLKDTGAKKCTQGLRRPFGVAVMDITDIIKGKAESDEEKQHFIPFHPVTAENDFLHSLLGKVIASKGDSGGQGLWVTMKMLVGDIIQIRKDYPHLVDRTTVVARKLGFPEIIMPGDVRNDIYITLLQGDFDKYNKTTQRNVEVIMCVCAEDGKTLPNAICVGAGDKPMNEYRSVVYYQVKQPRWMETVKVAVPIEDMQRIHLRFMFRHRSSLESKDKGEKNFAMSYVKLMKEDGTTLHDGFHDLVVLKGDSKKMEDASAYLTLPSYRHHVENKGATLSRSSSSVGGLSVSSRDVFSISTLVCSTKLTQNVGLLGLLKWRMKPQLLQENLEKLKIVDGEEVVKFLQDTLDALFNIMMEHSQSDEYDILVFDALIYIIGLIADRKFQHFNTVLEAYIQQHFSATLAYKKLMTVLKTYLDTSSRGEQCEPILRTLKALEYVFKFIVRSRTLFSQLYEGKEQMEFEESMRRLFESINNLMKSQYKTTILLQVAALKYIPSVLHDVEMVFDAKLLSQLLYEFYTCIPPVKLQKQKVQSMNEIVQSNLFKKQECRDILLPVITKELKELLEQKDDMQHQVLERKYCVELLNSILEVLSYQDAAFTYHHIQEIMVQLLRTVNRTVITMGRDHILISHFVACMTAILNQMGDQHYSFYIETFQTSSELVDFLMETFIMFKDLIGKNVYPGDWMAMSMVQNRVFLRAINKFAETMNQKFLEHTNFEFQLWNNYFHLAVAFITQDSLQLEQFSHAKYNKILNKYGDMRRLIGFSIRDMWYKLGQNKICFIPGMVGPILEMTLIPEAELRKATIPIFFDMMLCEYQRSGDFKKFENEIILKLDHEVEGGRGDEQYMQLLESILMECAAEHPTIAKSVENFVNLVKGLLEKLLDYRGVMTDESKDNRMSCTVNLLNFYKDNNREEMYIRYLYKLRDLHLDCDNYTEAAYTLLLHTWLLKWSDEQCASQVMQTGQQHPQTHRQLKETLYETIIGYFDKGKMWEEAISLCKELAEQYEMEIFDYELLSQNLIQQAKFYESIMKILRPKPDYFAVGYYGQGFPSFLRNKVFIYRGKEYERREDFQMQLMTQFPNAEKMNTTSAPGDDVKNAPGQYIQCFTVQPVLDEHPRFKNKPVPDQIINFYKSNYVQRFHYSRPVRRGTVDPENEFASMWIERTSFVTAYKLPGILRWFEVVHMSQTTISPLENAIETMSTANEKILMMINQYQSDETLPINPLSMLLNGIVDPAVMGGFAKYEKAFFTEEYVRDHPEDQDKLTHLKDLIAWQIPFLGAGIKIHEKRVSDNLRPFHDRMEECFKNLKMKVEKEYGVREMPDFDDRRVGRPRSMLRSYRQMSIISLASMNSDCSTPSKPTSESFDLELASPKTPRVEQEEPISPGSTLPEVKLRRSKKRTKRSSVVFADEKAAAESDLKRLSRKHEFMSDTNLSEHAAIPLKASVLSQMSFASQSMPTIPALALSVAGIPGLDEANTSPRLSQTFLQLSDGDKKTLTRKKVNQFFKTMLASKSAEEGKQIPDSLSTDL

SEQ ID NO: 163 - DNA, 6069 bp, Homo sapiens
agccaccccctgacggcttccccacgggaggacgcgaggccccggcccagccatggccccctggcgcaaagctgacaaggagcggcacggcgtggccatatacaacttccaaggcagcggagccccccagctctccctgcagatcggcgatgtggtgcgaatacaggagacgtgtggagactggtataggggatacctcataaagcacaaaatgttacagggcatttttcctaagtcatttatccacatcaaggaagtgacagttgagaaaagaagaaatactgagaacatcattcctgcagaaattcctctggcacaagaagtgacaacgacactttgggaatggggaagcatctggaaacaactctatgtggccagcaaaaaggagcgttttctccaggtgcagtccatgatgtacgatctgatggagtggaggtcccagcttctctcaggaaccttacccaaggatgagctgaaggaactgaagcagaaagtcacgtccaaaattgactatggcaacaaaatccttgagcttgatttgattgtcagagatgaagacggaaatatcttggaccctgataataccagtgtcatcagcttgttccatgcacatgaggaagcaactgataaaatcacagagcgtatcaaagaagaaatgtcaaaagaccagccagattatgcaatgtattcccggatctcctcatcccccacccatagcctctatgtgtttgtgagaaactttgtgtgcagaattggggaagatgctgagctcttcatgtctctctacgaccccaacaagcaaacggtcataagtgagaactacctagtgcgatggggcagccggggcttccctaaggagattgagatgctcaacaatctgaaggtggtcttcacggatcttggaaacaaagacctcaacagggataaaatttacttgatttgtcaaatagtccgggtcggcaagatggatcttaaggatactggtgcaaagaagtgcacgcagggactgaggaggccctttggggtggcagttatggatataacagacatcatcaaggggaaagcagagagtgatgaagaaaagcagcacttcattccttttcacccggttacagctgagaatgacttcctacacagcctgctgggcaaagtcatagcctccaagggggacagtggagggcaaggcctctgggtgaccatgaagatgctggtgggtgacatcattcagattcgcaaggactatccacacctggtggacaggaccaccgtggtggccaggaagctgggattcccagagatcatcatgccaggggatgtcaggaacgacatctacattactctcttacaaggtgactttgacaagtacaacaagaccacacagaggaatgtggaagtcatcatgtgtgtgtgcgcggaggatggcaaaacgctgcctaatgcaatttgcgtgggagcaggggacaagcccatgaatgagtatcgctccgttgtgtactatcaagtcaaacagccacgctggatggaaacagtcaaggtggctgtccctattgaagacatgcagaggatccatctgcgattcatgtttcgacatcggtcatctctggaatctaaagataaaggagaaaagaactttgccatgtcctatgtgaagctgatgaaagaagatgggactactctacacgatggattccatgacttagttgtcctcaagggggacagcaagaagatggaggatgccagcgcatacctgacccttccttcttatcgacaccatgtggaaaacaagggggccacgctgagcaggagctccagcagtgttggggggctttctgtcagctcccgggatgtgttctccatttccaccctggtgtgctccacaaagctcactcagaatgtgggcttgctgggtttgctgaagtggcgtatgaagcctcaactgctacaggagaatttagaaaagttgaagattgtggatggagaggaagtggtgaagtttctccaggatactctggatgccctcttcaacatcatgatggagcattctcaaagtgatgaatatgacatcctcgtctttgatgccttgatttacataataggactcattgcagaccggaaatttcagcatttcaacaccgttctggaggcttacatccaacagcatttcagtgcgaccttggcttacaagaaattgatgacagtgctgaagacttacttggatacctccagcagaggggagcaatgtgagccaatcctaagaacgctgaaggctttggaatatgtgttcaagttcattgttcggtcgaggacattattttcacagctttatgaaggcaaagaacagatggagtttgaagaatccatgagacggctctttgaatccatcaacaatctgatgaaaagtcaatacaaaactaccatccttttgcaggtggcggctttgaaatacatcccatctgtcctgcatgatgtagaaatggtctttgatgcgaagttactcagccaactcctgtatgagttctacacctgcatccctcctgtgaaactccagaagcagaaagtacagtctatgaatgagatagtccagagcaacctctttaaaaagcaagaatgccgggacattctgcttcctgtcatcaccaaagagctgaaggagctgctggagcagaaggatgacatgcaacaccaggtcctggagaggaagtactgcgttgaattgctcaacagcatcttggaagtccttagctaccaggatgcggccttcacctaccaccatatccaggagatcatggtccagctgctgcggacagtgaaccggacagtcatcaccatgggccgggatcacattctgattagtcactttgtggcatgtatgacagccatcttaaaccagatgggtgaccagcactactccttctacattgagaccttccagaccagctctgaacttgtggacttcttgatggagaccttcatcatgttcaaggacctcattggaaagaacgtgtaccctggagactggatggccatgagcatggttcaaaacagggtcttcctgagagctatcaacaagtttgcagaaaccatgaaccagaagttcctagaacacacgaactttgagttccagctgtggaacaactattttcatctggcagtggcttttatcacccaggattctctgcagctggagcagttctcacacgccaaatacaacaaaatcctgaataagtatggggacatgagacggctaattggcttctccatccgtgatatgtggtacaagcttggtcagaacaaaatctgcttcatcccaggcatggtaggacctatattagagatgacacttatccctgaggctgagctccggaaagccaccataccaatcttcttcgacatgatgctgtgtgaatatcaaagaagtggggatttcaaaaagtttgaaaacgaaatcatcctgaagctggaccacgaggtagaagggggccgaggcgacgagcagtacatgcagctcctggagtcaatcctgatggaatgtgctgcagagcacccaaccattgccaagtcggtggagaacttcgtgaacctggtcaaaggcctcctggagaagctgctggattaccggggtgtgatgacagatgagagcaaagacaaccgcatgagctgcaccgtgaacctgctgaatttctacaaagataacaacagggaggagatgtacataaggtacctgtacaaactccgcgatcttcacctggactgtgacaattacacagaggctgcctacacgctccttctccacacctggcttctcaagtggtcggatgagcagtgtgcatcacaggtcatgcagacaggccagcagcacccccagacacaccggcagctgaaggagacgctctacgagaccatcataggctactttgacaaaggaaagatgtgggaagaggccataagtctgtgcaaggagctggcggaacagtacgagatggagatctttgactatgagctgctcagccagaacctgatccagcaggcaaaattctatgaaagcatcatgaaaatcctcaggcccaaaccagactactttgctgttggatactacggccagggattcccctccttcctgcggaacaaagtgttcatctaccgcgggaaggaatatgagcgaagagaagatttccagatgcagctgatgacccagttccccaatgcagagaagatgaacaccacctctgccccgggagatgatgtgaagaatgccccaggccagtatatccagtgcttcactgtccagcctgtcttggatgaacatcccaggttcaagaataagccagtgcctgaccagattataaacttctacaaatccaactacgtgcaaaggttccactactcccggcccgtgcgcagggggaccgtagacccagagaatgagtttgcttccatgtggattgagagaacctccttcgtgactgcatacaagctgccggggatcctgcgctggtttgaggtggtgcacatgtcgcagaccacaattagtcctctggagaatgccatagaaaccatgtccacggccaatgagaagatcctgatgatgataaaccagtaccagagtgatgagaccctccccatcaacccactctccatgctcctgaacgggattgtggaccctgctgtcatgggaggcttcgccaagtatgagaaggccttcttcactgaagagtatgtcagggaccaccctgaggaccaggacaagctgacccacctcaaggacctgattgcatggcagatccccttcttgggagctgggattaagatccatgagaaaagggtgtcagataacttgcgacccttccatgaccggatggaggaatgtttcaagaacctgaaaatgaaggtggagaaggagtacggtgtccgagagatgcctgactttgacgacaggagagtgggccgtcccaggtctatgctgcgctcatacagacagatgtccatcatctctctggcttccatgaattctgactgcagcacccccagcaagcctacctcagagagctttgacctggaattagcatcacccaagacgccgagagtggagcaggaggaaccgatctccccggggagcaccctgcctgaggtcaagctgcggaggtccaagaagaggacaaagagaagcagcgtagtttttgcggatgagaaagcagctgcagagtcggacctgaagcggctttccaggaagcatgagttcatgagtgacaccaacctctcggagcatgcggccatccccctcaaggcgtctgtcctctctcaaatgagctttgccagccagtccatgcctaccatcccagccctggcgctctcagtggcaggcatccctgggttggatgaggccaacacatctccccgcctcagccagaccttcctccaactctcagatggtgacaagaagacactcacacggaagaaggtcaatcagttcttcaagacaatgctggccagcaaatcggctgaagaaggcaaacagatcccagactcgctgtccacggacctgtgagctgctgctgactagggctgcatgggagagccagggaggggagtttctggaagaggaaagccatgcgtggaacatcgaagcctcagagagtgggagactgtccccatcagttgtccttacttagaggagacagagaggccaatcaggtcccagagcttgaatgctaacaagcccagcatcccctggggctgtgatcatggtggatgaggaagcctcaacgtagattcctgaactcaaggtaccagcaagaatgccttctcccagtgtgctctccccaacatcctaggcacagctttcataacccagtttcttaggtgtaagaaactgtttttatctcatttattaagtctcagaacttaacagaaaaggaagccttttaaatattctttttaattttattttagattaacagttttgtactttacatttttttatacaaccaaccagtttcttttctagccaatcatctctgaagagttgctgtttcttactgacaataaaaaatgttctcttggttcgaataa

SEQ ID NO: 164 - protein, 1828 aa, Mus musculus
MAPWRKTDKERHGVAIYNFQGSEAQHLTLQIGDVVRIQETCGDWYRGYLIKHKLSQGIFPTSFIHLKEVTVEKRRNIENIIPAEIPLAQEVTTTLWEWGSIWKQLYVASKKERFLQVQSMMYDLMEWRSQLLSGTLPKDELKELKQKVTSKIDYGNKILELDLIVRDEDGNILDPDKTSVISLFHAHEEATYKITERIKEEMSKDQPDYGVYSRISSSPTHSLYVFVRNFVCRIGEDAELFMSLYDPHKQTVISENYLVRWGSKGFPKEIEMLNNLKVVFTDLGNKDLNRDKIFLICQIVRIGKMDLKDINAKKCTQGLRRPFGVAVMDITDIIKGKAESDEEKQHFIPFHPVSAENDFLHSLLGKVIASKGDSGGQGLWVTMKMLVGDIIQIRKDYPHLVDRTTVVARKLGFPEIIMPGDVRNDIYITLLQGDFDKYTKTTQRNVEVIMCVCTEDGKVLPNAICVGAGDKAMNEYHSVVYYQVKQPRWMETVKVAVPIEDMQRIHLRFMFRHRSSLESKDKGEKNFAMSYVKLMKEDGTTLHDGYHELVVLKGDSKKMEDASAYLTLPSYRHPVENKGATLSRSSSSVGGLSVSSRDVFSISTLVCSTKLTQNVGLLGLLKWRMKPQLLQENLEKLKIVDGEEVVKFLQDTLDALFNIMMEHSQSNEYDILVFDALIYIIGLIADRKFQHFNTVLEAYIQQHFSATLAYKKLMTVLKTYLDTSSRGEQCEPILRTLKALEYVFKFIVRSRTLFSQLYEGKEQMEFEESMRRLFESINNLMKSQYKTTILLQVAALKYIPSVLHDVETVFDAKLLSQLLYEFYTCIPPVKLQKQKVQSMNEIVQSNLFKKQECRDILLPVITKELKELLEQRDDGQHQAEKKHCVELLNSILEVLSCQDAAFTYDHIQEIMVQLLRTVNRTVITMGRDHALISHFVACMTAILDQMGDQHYSFYIETFQTSSDLVDFLMETFIMFKDLIGKNVYPGDWMAMSMVQNRVFLRAINKFAETMNQKFLEHTSFEFQLWNNYFHLAVAFITQDSLQLEQFTHAKYNKILNKYGDMRRLIGFSIRDMWYKLGQNKICFIPGMVGPILEMTLIPEAELRKATIPIFFDMMLCEYQRTGAFKKFENEIILKLDHEVEGGRGDEQYMQLLESILMECTAEHPTIAKSVENFVSLVKGLLEKLLDYRGVMTDESKDNRMSCTVNLLNFYKDNNREEMYIRYLYKLRDLHLDCENYTEAAYTLLLHTWLLKWSDEQCASQVMQTGQQHPQTHRQLKETLYETIIGYFDKGKMWEEAISLCKELAEQYEMEIFDYELLSQNLTQQAKFYENIMKILRTKPDYFAVGYYGQGFPSFLRNKVFIYRGKEYERREDFQMQLLSQFPNAEKMNTTSAPGDDVRNAPGQYIQCFTVQPVLDEHPRFKNKPVPDQIINFYKSNYVQKFHYSRPVRRGKVDPENEFASMWIERTSFLTAYKLPGILRWFEVVHMSQTTISPLENAIETMSTVNEKILMMINQYQSDESLPINPLSMLLNGIVDPAVMGGFAKYEKAFFTEEYSREHPEDQDKLSHLKDLIAWQIPFLGAGIKIHEKRVSDNLRPFHDRMEECFKNLKMKVEKEYGVREMPDFEDRRVGRPRSMLRSYRQMSVISLASMHSDCSTPSKVPAESFDLESAPPKTPKVEEEPISPGSTLPEVKLRRSKKRTKRSSVVFADEKAATESDLKRLSRKQEFMSDTNLSEHAAIPARVSILSQMSFASQSMPTIPALTLSVAGVPGLDEANTSPRLSQTFFQVSDGDKKTLKKKKVNQFFKTMLASKSSEESKQIPDFLSTNM

SEQ ID NO: 165 - DNA, 6431 bp, Mus musculus
agtggggccctgcaaggcgcctaaccaccccagccagcttcttcactagagaacaggaggctctcaaggctccggtcttgccatggccccctggcgcaaaactgacaaggagcgtcacggagtggctatctacaacttccaaggcagtgaagcccagcatctcacgctacagattggcgatgtggtacgaatacaggagacctgtggagactggtacagagggtacctcataaagcataaactgtcacagggcattttccctacatcctttatccatctcaaggaagtgacagtggagaagagaaggaacatagagaacatcattcctgcagaaatccctctggcacaagaagtgacaaccacgctctgggagtggggaagcatctggaagcagctctatgtggccagcaaaaaggaacgcttcctccaagtgcagtccatgatgtacgacctgatggaatggcgctctcagctcctctcaggaacgctacccaaggatgagctgaaggaactgaagcagaaagtcacatcgaagatcgactatggcaacaaaatccttgagctcgatctcattgtcagagatgaagatggaaacatactggaccctgataagaccagcgtcatcagcttgttccatgctcacgaggaggcaacttacaaaatcacagagcgcatcaaagaagaaatgtcaaaagaccagccagattatggggtttattctcggatctcctcatcccccacccacagcctctacgtctttgtgagaaactttgtgtgccgaattggggaggatgctgagctcttcatgtctctctatgaccctcacaagcaaacggtcatcagtgagaactatctggtgcgatggggcagcaaaggattcccaaaggaaattgagatgctcaataacctgaaggtagtcttcacggatcttggaaataaagacctcaacagggataagattttcttgatctgtcaaatagtccgaattgggaagatggatcttaaggacattaatgccaagaagtgcacccaggggctgaggagaccttttggggtggcagttatggacatcaccgacatcatcaagggcaaggcagagagcgacgaagagaagcaacattttattccatttcacccggtctcagctgagaacgatttccttcacagccttctgggcaaagtcatagcttccaagggagacagtggagggcaaggcctttgggtgaccatgaagatgctggtgggggacatcattcagatccgtaaagactacccacacttggtggacaggaccactgtggtagcccgaaagctgggcttcccagagatcatcatgccaggggatgtcaggaacgacatctacatcactctcttacaaggtgactttgacaagtacaccaagaccacacagcggaacgtggaagtgatcatgtgtgtgtgcacagaggatggcaaagtgctacctaatgcaatttgtgtgggagcgggggataaggccatgaacgagtaccactcagtcgtctactaccaagtcaaacagccccgatggatggaaacagtcaaggtggctgtccctattgaagatatgcagaggatccatttgaggttcatgtttcgacaccgctcatcactagaatctaaagataaaggagaaaagaactttgccatgtcctacgtgaaactcatgaaagaagatggaaccactctgcatgatggataccacgagttggtggttctcaagggagacagcaagaaaatggaagatgccagcgcttacctgacacttccttcttatcgacaccccgtggaaaacaagggagctacgctgagccggagctccagcagtgttgggggcctttctgtcagctcccgggatgtgttctccatttccacgctagtgtgctccacaaagctgacccagaatgtgggtttgcttggcttgctgaagtggcgtatgaagccacaactgctccaggagaatctagagaagttgaagattgtggatggcgaggaagtagtgaagttcctccaggacactctggatgccctcttcaacatcatgatggaacactctcagagtaacgagtatgacatcctcgtctttgatgctttgatctatataataggactcattgcagaccggaaattccagcattttaacaccgtattggaggcttacatccaacagcatttcagtgctaccttggcctacaagaaactgatgacggtgctgaagacttacttggatacctccagcaggggggagcagtgcgagcccatcctcagaacgctcaaagccttagaatacgtgttcaagttcattgttcggtcgaggacattattctcacagctttacgaaggcaaagagcagatggagtttgaagaatccatgagacggctcttcgaatccatcaacaacctgatgaaaagtcagtacaagaccaccatcctattgcaggtggcggctttgaaatacatcccttcagtccttcacgatgtggaaacagtctttgatgccaagttgctcagccagctactgtatgagttctacacctgcatccctcccgtgaagctgcagaagcagaaagttcagtccatgaatgagatcgtgcagagcaacctcttcaaaaagcaagaatgccgggacattctgcttcctgtcatcaccaaagagctgaaggagctgctggagcagagggacgatgggcagcaccaggctgagaagaagcactgtgtggaacttctcaacagcatcttggaggtcctcagctgtcaggatgcggccttcacttatgaccacatccaagagatcatggtccagctgcttcgcacagtgaaccggacagtcatcacgatgggccgagatcacgctttgattagtcactttgtggcgtgtatgacagctatcttagaccagatgggcgaccaacactattcattttacattgagaccttccagaccagctcagaccttgtggacttcttgatggagacattcatcatgttcaaggacctcattgggaagaatgtgtatcctggggactggatggccatgagcatggtccagaaccgggtcttcctgagagccatcaacaagtttgcagaaaccatgaaccagaagtttctggaacacacaagctttgagttccagctgtggaacaactattttcatctggcagttgcctttatcactcaggactctctgcagctggagcagttcacacacgctaagtacaacaaaatcctgaataagtacggggacatgagacggctcataggattctccatccgtgatatgtggtacaagcttggccagaacaaaatctgcttcatcccgggcatggtgggacctatattagagatgacacttatccctgaggctgagctcaggaaagccaccatcccaatcttcttcgacatgatgctgtgtgaatatcaaaggactggggctttcaaaaagtttgaaaatgaaatcatcctgaagctggaccatgaggtggaaggaggccggggggatgagcagtacatgcaactgctggagtccatcctgatggagtgcacagcggaacacccaaccattgccaagtcggtggagaactttgtgagcttggtcaaagggctgctggagaagttgctagattaccggggcgtgatgacagatgagagcaaagacaaccgtatgagctgcacagtgaacttgctgaatttctacaaagataacaaccgggaagagatgtacataagatacctgtataaactgcgtgaccttcacttggactgtgaaaactacacagaggctgcctacacactcctcctccacacctggcttctcaagtggtcagatgagcagtgtgcatcccaggtcatgcagacaggccagcagcaccctcagacccaccggcagctgaaggagacactctatgagaccattataggctactttgacaaaggaaagatgtgggaagaggccatcagcctgtgcaaggaactggcggaacaatatgagatggagatctttgactacgagctactcagccagaacctgacccagcaggccaaattctatgaaaacatcatgaaaatcctcagaaccaaaccagactactttgctgttggatactatggccagggattcccctcctttctgcggaacaaagtgttcatctaccgaggcaaggaatatgagcgaagagaagacttccagatgcagcttttgagccagttccccaacgcagaaaagatgaacacaacttctgccccaggagacgatgtgaggaatgccccaggccagtacatccagtgtttcactgtgcagcctgttctggatgaacaccccaggttcaagaacaaaccggtgcctgaccagatcataaacttttacaagtctaattatgtgcaaaagttccactactccaggcctgtgcgcaggggcaaggtagacccagagaacgagtttgcttccatgtggatcgagaggacttccttcctgacggcctacaagctgcctggcatcctgcgctggtttgaggtagttcacatgtctcagaccacaattagtcctctggagaatgccatcgagactatgtccacagtcaacgagaagatcctgatgatgataaaccagtaccagagtgatgaaagcctccccatcaaccctctctccatgctcctcaatgggatcgtggaccctgctgtcatgggaggcttcgccaagtatgagaaggccttcttcactgaagagtatagcagggagcacccggaggaccaggacaagctgagccatctcaaggacctgattgcatggcagatccctttcctgggagctgggattaagatccacgagaaaagggtgtcagacaacctgcgccccttccatgaccggatggaggagtgcttcaagaacctgaaaatgaaggtggaaaaggagtatggtgtccgagagatgcctgacttcgaagacaggagagtgggccgccccaggtccatgctgcgttcctacaggcagatgtccgtcatctctctggcctccatgcattctgactgcagcactcccagcaaagtccccgcagaaagttttgacctagagtcagccccacccaagactcccaaagtggaggaggagcccatctccccagggagcactctgccagaggtcaagctgcggcggtccaagaaaaggaccaagaggagcagcgtggtgtttgcagacgagaaggcagcaacggagtcagacctgaagcggctttctagaaagcaagagttcatgagtgacaccaacctctcagagcatgcagccatccctgccagggtgtctatcctctctcagatgagttttgccagccagtccatgcccaccatcccagccctcacactctccgtggcaggcgtgcctgggttggatgaggccaacacatctccccgcctgagtcagaccttcttccaagtctcagatggtgacaagaagaccctgaaaaagaagaaagtcaatcaattcttcaagaccatgctggctagcaagtcgagtgaagaaagcaagcagatcccagacttcctgtccaccaacatgtgaggcactgctgagccgagcactgtgggaactcgagcgggaatgcatgagtatgaccttggagttccacaaggagacaagtctgtaaaagagacagatgatctcaaggggcccccagaactcaagtgatgactagccttgcatctcctgtggccactacaacagtgatggatgactcaacagacaaagaagccccaccatggattgttggaccccaaggagccagcaagtgcccaatgaatgttctccccagcatccaagggacgcatgtcataactcaaattcacagctaggaggagctgtcttctgtttcattcctaagtgtcagcacttaaaagaactgatttaaatgttctattttcccttaacatttttgtacttttacattttttttctaataagccccttgctactccatcatctccagactgctgctctttcttacccacattaaaaatgacccatagctcaaatgaaccttgttgctgagtctcttattgaaggactgaggagaaagatcccaggatgggaggcagcccaggggactacagcaatatgaaaggcttatgttggctcatctcaatgccatgttttctctccttgctcaggcaaactcaagaatcttctctgctctaagaaagaagcaggaatgagatttcttctaatttctccattgtttagttattttgatttgagatactttactgatatacaagctatttaaactatttggggaaaaaagcaatgtttgagatagctaatataatggcttctcaatggaatgatagcacaatttgaaatgataccaaaaagaataataaaatgaaccgtttgaggtttgcttaaaaaaaaaaaaaaaaaaaaa

SEQ ID NO: 166 - DNA, 1572 bp, Homo sapiens
gaggacagactgaagaaacatccaaggtggtcttgaaggacactgggatcctgtaacacagccccggatatctgtgttaccagccttgtctcggccacctcaaggataatcactaaattctgccgaaaggactgaggaacggtgcctggaaaagggcaagaatatcacggcatgggcatgagtagcttgaaactgctgaagtatgtcctgtttttcttcaacttgctcttttggatctgtggctgctgcattttgggctttgggatctacctgctgatccacaacaacttcggagtgctcttccataacctcccctccctcacgctgggcaatgtgtttgtcatcgtgggctctattatcatggtagttgccttcctgggctgcatgggctctatcaaggaaaacaagtgtctgcttatgtcgttcttcatcctgctgctgattatcctccttgctgaggtgaccttggccatcctgctctttgtatatgaacagaagctgaatgagtatgtggctaagggtctgaccgacagcatccaccgttaccactcagacaatagcaccaaggcagcgtgggactccatccagtcatttctgcagtgttgtggtataaatggcacgagtgattggaccagtggcccaccagcatcttgcccctcagatcgaaaagtggagggttgctatgcgaaagcaagactgtggtttcattccaatttcctgtatatcggaatcatcaccatctgtgtatgtgtgattgaggtgttggggatgtcctttgcactgaccctgaactgccagattgacaaaaccagccagaccatagggctatgatctgcagtagtcctgtggtgaagagacttgtttcatctccggaaatgcaaaaccatttatagcatgaagccctacatgatcactgcaggatgatcctcctcccatcctttccctttttaggtccctgtcttatacaaccagagaagtgggtgttggccaggcacatcccatctcaggcagcaagacaatctttcactcactgacggcagcagccatgtctctcaaagtggtgaaactaatatctgagcatcttttagacaagagaggcaaagacaaactggatttaatggcccaacatcaaagggtgaacccaggatatgaatttttgcatcttcccattgtcgaattagtctccagcctctaaataatgcccagtcttctccccaaagtcaagcaagagactagttgaagggagttctggggccaggctcactggaccattgtcacaaccctctgtttctctttgactaagtgccctggctacaggaattacacagttctctttctccaaagggcaagatctcatttcaatttctttattagagggccttattgatgtgttctaagtctttccagaaaaaaactatccagtgatttatatcctgatttcaaccagtcacttagctgataatcacagtaagaagacttctggtattatctctctatcagataagattttgttaatgtactattttactcttcaataaataaaagtttattatctcaatcacaacattgcta

SEQ ID NO: 167 - protein, 219 aa, Homo sapiens
MGMSSLKLLKYVLFFFNLLFWICGCCILGFGIYLLIHNNFGVLFHNLPSLTLGNVFVIVGSIIMVVAFLGCMGSIKENKCLLMSFFILLLIILLAEVTLAILLFVYEQKLNEYVAKGLTDSIHRYHSDNSTKAAWDSIQSFLQCCGINGTSDWTSGPPASCPSDRKVEGCYAKARLWFHSNFLYIGIITICVCVIEVLGMSFALTLNCQIDKTSQTIGL

SEQ ID NO: 168 - DNA, 1567 bp, Homo sapiens
gtcgtcacagcatgatcatattttttcacccttcacttctccttttacacaaatagccccggatatctgtgttaccagccttgtctcggccacctcaaggataatcactaaattctgccgaaaggactgaggaacggtgcctggaaaagggcaagaatatcacggcatgggcatgagtagcttgaaactgctgaagtatgtcctgtttttcttcaacttgctcttttggatctgtggctgctgcattttgggctttgggatctacctgctgatccacaacaacttcggagtgctcttccataacctcccctccctcacgctgggcaatgtgtttgtcatcgtgggctctattatcatggtagttgccttcctgggctgcatgggctctatcaaggaaaacaagtgtctgcttatgtcgttcttcatcctgctgctgattatcctccttgctgaggtgaccttggccatcctgctctttgtatatgaacagaagctgaatgagtatgtggctaagggtctgaccgacagcatccaccgttaccactcagacaatagcaccaaggcagcgtgggactccatccagtcatttctgcagtgttgtggtataaatggcacgagtgattggaccagtggcccaccagcatcttgcccctcagatcgaaaagtggagggttgctatgcgaaagcaagactgtggtttcattccaatttcctgtatatcggaatcatcaccatctgtgtatgtgtgattgaggtgttggggatgtcctttgcactgaccctgaactgccagattgacaaaaccagccagaccatagggctatgatctgcagtagtcctgtggtgaagagacttgtttcatctccggaaatgcaaaaccatttatagcatgaagccctacatgatcactgcaggatgatcctcctcccatcctttccctttttaggtccctgtcttatacaaccagagaagtgggtgttggccaggcacatcccatctcaggcagcaagacaatctttcactcactgacggcagcagccatgtctctcaaagtggtgaaactaatatctgagcatcttttagacaagagaggcaaagacaaactggatttaatggcccaacatcaaagggtgaacccaggatatgaatttttgcatcttcccattgtcgaattagtctccagcctctaaataatgcccagtcttctccccaaagtcaagcaagagactagttgaagggagttctggggccaggctcactggaccattgtcacaaccctctgtttctctttgactaagtgccctggctacaggaattacacagttctctttctccaaagggcaagatctcatttcaatttctttattagagggccttattgatgtgttctaagtctttccagaaaaaaactatccagtgatttatatcctgatttcaaccagtcacttagctgataatcacagtaagaagacttctggtattatctctctatcagataagattttgttaatgtactattttactcttcaataaataaaagtttattatctcaatcacaacattgcta

SEQ ID NO: 169 - protein, 160 aa, Homo sapiens
MGMSSLKLLKYVLFFFNLLFWICGCCILGFGIYLLIHNNFGVLFHNLPSLTLGNVFVIVGSIIMVVAFLGCMGSIKENKCLLMSFFILLLIILLAEVTLAILLFVYEQKGCYAKARLWFHSNFLYIGIITICVCVIEVLGMSFALTLNCQIDKTSQTIGL

SEQ ID NO: 170 - DNA, 1390 bp, Homo sapiens
gtcgtcacagcatgatcatattttttcacccttcacttctccttttacacaaatagccccggatatctgtgttaccagccttgtctcggccacctcaaggataatcactaaattctgccgaaaggactgaggaacggtgcctggaaaagggcaagaatatcacggcatgggcatgagtagcttgaaactgctgaagtatgtcctgtttttcttcaacttgctcttttggatctgtggctgctgcattttgggctttgggatctacctgctgatccacaacaacttcggagtgctcttccataacctcccctccctcacgctgggcaatgtgtttgtcatcgtgggctctattatcatggtagttgccttcctgggctgcatgggctctatcaaggaaaacaagtgtctgcttatgtcgttcttcatcctgctgctgattatcctccttgctgaggtgaccttggccatcctgctctttgtatatgaacagaagggttgctatgcgaaagcaagactgtggtttcattccaatttcctgtatatcggaatcatcaccatctgtgtatgtgtgattgaggtgttggggatgtcctttgcactgaccctgaactgccagattgacaaaaccagccagaccatagggctatgatctgcagtagtcctgtggtgaagagacttgtttcatctccggaaatgcaaaaccatttatagcatgaagccctacatgatcactgcaggatgatcctcctcccatcctttccctttttaggtccctgtcttatacaaccagagaagtgggtgttggccaggcacatcccatctcaggcagcaagacaatctttcactcactgacggcagcagccatgtctctcaaagtggtgaaactaatatctgagcatcttttagacaagagaggcaaagacaaactggatttaatggcccaacatcaaagggtgaacccaggatatgaatttttgcatcttcccattgtcgaattagtctccagcctctaaataatgcccagtcttctccccaaagtcaagcaagagactagttgaagggagttctggggccaggctcactggaccattgtcacaaccctctgtttctctttgactaagtgccctggctacaggaattacacagttctctttctccaaagggcaagatctcatttcaatttctttattagagggccttattgatgtgttctaagtctttccagaaaaaaactatccagtgatttatatcctgatttcaaccagtcacttagctgataatcacagtaagaagacttctggtattatctctctatcagataagattttgttaatgtactattttactcttcaataaataaaagtttattatctcaatcacaacattgcta

SEQ ID NO: 171 - DNA, 2802 bp, Mus musculus
agtctcacttcctcactcttctcgcttgggtttcctgtcgtcacagcatgattgtattttttctctcttcacttctccttttacacaaatagacatagacttctgggttacaggctgtgctggccacctaaaagataatcagtgaattctacctgaagtactgagggacactgccttcaaaagggcatactatcccagcatgggcatgagcagcctgaaattgctgaaatatgttctgtttatctttaacttgcttttttgggtctgtggctgttgcattttgggctttggcatctatttcctggtccaaaatacctatggagtactcttccgtaaccttcccttcctgacacttggcaacattctggtcattgtgggatccattatcatggtagttgccttcttgggttgcatgggctcaatcaaggaaaataagtgcctgcttatgtcgttctttgttctgctgctgattattctccttgctgaggtgaccatagccatcctgctctttgtgtatgaacaaaaactcaacactttagtggctgagggtctgaatgacagcatccaacattatcactctgacaacagcactatgaaggcatgggacttcatccagacacaactgcagtgttgtggtgtaaatggctcaagtgattggaccagtggtccaccatcttcctgcccatcaggtgcagatgttcagggttgctataataaggcaaaatcgtggtttcactccaatttcttgtatattggaatcattaccatctgtgtatgtgtgatacaggtgctgggaatgtcctttgcactgacactcaactgccagattgacaaaacaagccaggctttagggctgtgacttgcaacttccccctgcttaagtgacttattcctctctagaaagtcaaagcatccattccatgagaacttaaacaattacctgcctgactggcattttggcttcttcttattccatctttgactggatctctgtcttatacacatccactgaagagaatatttgtcatggacttcccatatcaagcagaagacaaacattaaccaactgatagcagtaaccatatcccttaaagatggtgaaacatacctgggtgtttttggttttttttttttttttacatacttgggtattttttttaaagagacactgtagcactggtggcttgagatccactgccagctgctggtgtggttatttctcagagtactagcctagcaaatgtgagcccttgagtttagccccaaatactacaaaaaagaggtccaagtttaaatgttagtctcctaacaactgtcaaatcaatttctagcctctaaatcttgctacttccactctacaaagtcacataagagagaagctgatggaaatttttgagtcccattcattagataattgacatactcagtttccttttgaacacagtccttggtaataggaatcatacagaaatcttttatttctggaaaatattccaatttctttgtcttattgattttgttccatccatccatccagaaaagattattcccatcctattgttagtcagtctggtagccttgaattacattgccataaaacaacccagaagtattaatatctccagtgtgttagctgataatcacatccatgtctatgttttatttctctattaaataaggttctgttaatgtaccattttaacctgttaataaacaaaagtttataatcactatccatcaaacatttgactcattctgatatttctgttacaagccaaatatatgttatatttctgtataacaaattagttcaaaatgtagtggctaagaacctatatatttgttttataaattgactgatttaaagacagcattttgctatgtagcccaggctgtcttggaacttactatatgaccaaagatggcaccaaactcatgattaccctgcttttaacttctgaatattagaattacagttaagtgctactaagtcagaacaaacatttattgtctgatggctttatgtaatcaggagtgtggaagtagcttagaaaaatgattatagatagttgtttcttgcatatagtgattaagtggtcagccatatcttccatcatctcatgtctcattggaaaattaatccattgtcatgttctcatatagttgtaatgaacctcatataatggccacacataagtttatatgggtagtttcgtgaataatgagacaggtaagacataaaatgataggtagcatccaagacaaaagtcatagcacttttataacttaacccagaaatgatggcatcagttattctgggtcaaaagttcaatttccacccagggcaaaattacacaacaggcatatgacttctaggaagttgagatcattgatggccacatgagagattgctaaccatctcatgcttactatgtcaaaaaatatggtgtacttgtctatattatgtatatacataactatattctataaagtaaaaaattagaacacatataatgcctaatttatagaactcacaagaatagaaaataattggtttttgttttagaaatgttctgtagaattctctgacttgctttaaggaaaactggttattttcgtggtgctctatagggaaaatatctattgcattttctgagtcatataaagagtcatgtattcctctttgttcagactaacacttagtggtgacattaccagtaagttttcctgcctaatgcctgagctttgttcttagctctactttgttcttcactcccaataaaatgttatggagttctaagg

SEQ ID NO: 172 - protein, 219 aa, Mus musculus
MGMSSLKLLKYVLFIFNLLFWVCGCCILGFGIYFLVQNTYGVLFRNLPFLTLGNILVIVGSIIMVVAFLGCMGSIKENKCLLMSFFVLLLIILLAEVTIAILLFVYEQKLNTLVAEGLNDSIQHYHSDNSTMKAWDFIQTQLQCCGVNGSSDWTSGPPSSCPSGADVQGCYNKAKSWFHSNFLYIGIITICVCVIQVLGMSFALTLNCQIDKTSQALGL

SEQ ID NO: 173 - DNA, 2570 bp, Homo sapiens
ccgccctgctcgtgataaggcacaagcaagggctgccctgaaggaagctccaaagagaaaggagggcaggaagcccacggcccacaggggtgtagcccgagacccacctgcagcccccagcccttgccaggaaagcagcagccgcagccatggcggggatgaagacagcctccggggactacatcgactcgtcatgggagctgcgggtgtttgtgggagaggaggacccagaggccgagtcggtcaccctgcgggtcactggggagtcgcacatcggcggggtgctcctgaagattgtggagcagatcaatcgcaagcaggactggtcagaccatgctatttggtgggaacagaagaggcagtggctgctgcagacccactggacactggacaagtacgggatcctggccgacgcacgcctcttctttgggccccagcaccggcccgtcatccttcggttgcccaaccgccgcgcactgcgcctccgtgccagcttctcccagcccctcttccaggctgtggctgccatctgccgcctcctcagcatccggcaccccgaggagctgtccctgctccgggctcctgagaagaaggagaagaagaagaaagagaaggagccagaggaagagctctatgacttgagcaaggttgtcttggctgggggcgtggcacctgcactgttccgggggatgccagctcacttctcggacagcgcccagactgaggcctgctaccacatgctgagccggccccagccgccacccgaccccctcctgctccagcgtctgccacggcccagctccctgtcagacaagacccagctccacagcaggtggctggactcgtcgcggtgtctcatgcagcagggcatcaaggccggggacgcactctggctgcgcttcaagtactacagcttcttcgatttggatcccaagacagaccccgtgcggctgacacagctgtatgagcaggcccggtgggacctgctgctggaggagattgactgcaccgaggaggagatgatggtgtttgccgccctgcagtaccacatcaacaagctgtcccagagcggggaggtgggggagccggctggcacagacccagggctggacgacctggatgtggccctgagcaacctggaggtgaagctggaggggtcggcgcccacagatgtgctggacagcctcaccaccatcccagagctcaaggaccatctccgaatctttcgcatcccacgaaggccccggaagctgaccctgaagggctaccgccaacactgggtggtgttcaaggagaccacactgtcctactacaagagccaggacgaggcccctggggaccccattcagcagctcaacctcaagggctgtgaggtggttcccgatgttaacgtctccggccagaagttctgcattaaactcctagtgccctcccctgagggcatgagtgagatctacctgcggtgccaggatgagcagcagtatgcccgctggatggctggctgccgcctggcctccaaaggccgcaccatggccgacagcagctacaccagcgaggtgcaggccatcctggccttcctcagcctgcagcgcacgggcagtgggggcccgggcaaccacccccacggccctgatgcctctgccgagggcctcaacccctacggcctcgttgccccccgtttccagcgaaagttcaaggccaagcagctcaccccacggatcctggaagcccaccagaatgtggcccagttgtcgctggcagaggcccagctgcgcttcatccaggcctggcagtccctgcccgacttcggcatctcctatgtcatggtcaggttcaagggcagcaggaaagacgagatcctgggcatcgccaacaaccgactgatccgcatcgacttggccgtgggcgacgtggtcaagacctggcgtttcagcaacatgcgccagtggaatgtcaactgggacatccggcaggtggccatcgagtttgatgaacacatcaatgtggccttcagctgcgtgtctgccagctgccgaattgtacacgagtatatcgggggctacattttcctgtcgacgcgggagcgggcccgtggggaggagctggatgaagacctcttcctgcagctcaccgggggccatgaggccttctgagggctgtctgattgcccctgccctgctcaccaccctgtcacagccactcccaagcccacacccacaggggctcactgccccacacccgctccaggcaggcacccagctgggcatttcacctgctgtcactgactttgtgcaggccaaggacctggcagggccagacgctgtaccatcacccaggccagggatgggggtgggggtccctgagctcatgtggtgccccctttccttgtctgagtggctgaggctgatacccctgacctatctgcagtcccccagcacacaaggaagaccagatgtagctacaggatgatgaaacatggtttcaaacgagttctttcttgttactttttaaaatttcttttttataaattaatattttattgttggatcctcaaaaaaaaaaaaaaaaaa

SEQ ID NO: 174 - protein, 667 aa, Homo sapiens
MAGMKTASGDYIDSSWELRVFVGEEDPEAESVTLRVTGESHIGGVLLKIVEQINRKQDWSDHAIWWEQKRQWLLQTHWTLDKYGILADARLFFGPQHRPVILRLPNRRALRLRASFSQPLFQAVAAICRLLSIRHPEELSLLRAPEKKEKKKKEKEPEEELYDLSKVVLAGGVAPALFRGMPAHFSDSAQTEACYHMLSRPQPPPDPLLLQRLPRPSSLSDKTQLHSRWLDSSRCLMQQGIKAGDALWLRFKYYSFFDLDPKTDPVRLTQLYEQARWDLLLEEIDCTEEEMMVFAALQYHINKLSQSGEVGEPAGTDPGLDDLDVALSNLEVKLEGSAPTDVLDSLTTIPELKDHLRIFRIPRRPRKLTLKGYRQHWVVFKETTLSYYKSQDEAPGDPIQQLNLKGCEVVPDVNVSGQKFCIKLLVPSPEGMSEIYLRCQDEQQYARWMAGCRLASKGRTMADSSYTSEVQAILAFLSLQRTGSGGPGNHPHGPDASAEGLNPYGLVAPRFQRKFKAKQLTPRILEAHQNVAQLSLAEAQLRFIQAWQSLPDFGISYVMVRFKGSRKDEILGIANNRLIRIDLAVGDVVKTWRFSNMRQWNVNWDIRQVAIEFDEHINVAFSCVSASCRIVHEYIGGYIFLSTRERARGEELDEDLFLQLTGGHEAF

SEQ ID NO: 175 - DNA, 2558 bp, Homo sapiens
ccgccctgctcgtgataaggcacaagcaagggctgccctgaaggaagctccaaagagaaaggagggcaggaagcccacggcccacaggggtgtagcccgagacccacctgcagcccccagcccttgccaggaaagcagcagccgcagccatggcggggatgaagacagcctccggggactacatcgactcgtcatgggagctgcgggtgtttgtgggagaggaggacccagaggccgagtcggtcaccctgcgggtcactggggagtcgcacatcggcggggtgctcctgaagattgtggagcagatcaatcgcaagcaggactggtcagaccatgctatttggtgggaacagaagaggcagtggctgctgcagacccactggacactggacaagtacgggatcctggccgacgcacgcctcttctttgggccccagcaccggcccgtcatccttcggttgcccaaccgccgcgcactgcgcctccgtgccagcttctcccagcccctcttccaggctgtggctgccatctgccgcctcctcagcatccggcaccccgaggagctgtccctgctccgggctcctgagaagaaggagaagaagaagaaagagaaggagccagaggaagagctctatgacttgagcaaggttgtcttggctgggggcgtggcacctgcactgttccgggggatgccagctcacttctcggacagcgcccagactgaggcctgctaccacatgctgagccggccccagccgccacccgaccccctcctgctccagcgtctgccacggcccagctccctgtcagacaagacccagctccacagcaggtggctggactcgtcgcggtgtctcatgcagcagggcatcaaggccggggacgcactctggctgcgcttcaagtactacagcttcttcgatttggatcccaagacagaccccgtgcggctgacacagctgtatgagcaggcccggtgggacctgctgctggaggagattgactgcaccgaggaggagatgatggtgtttgccgccctgcagtaccacatcaacaagctgtcccagagcggggaggtgggggagccggctggcacagacccagggctggacgacctggatgtggccctgagcaacctggaggtgaagctggaggggtcggcgcccacagatgtgctggacagcctcaccaccatcccagagctcaaggaccatctccgaatctttcggccccggaagctgaccctgaagggctaccgccaacactgggtggtgttcaaggagaccacactgtcctactacaagagccaggacgaggcccctggggaccccattcagcagctcaacctcaagggctgtgaggtggttcccgatgttaacgtctccggccagaagttctgcattaaactcctagtgccctcccctgagggcatgagtgagatctacctgcggtgccaggatgagcagcagtatgcccgctggatggctggctgccgcctggcctccaaaggccgcaccatggccgacagcagctacaccagcgaggtgcaggccatcctggccttcctcagcctgcagcgcacgggcagtgggggcccgggcaaccacccccacggccctgatgcctctgccgagggcctcaacccctacggcctcgttgccccccgtttccagcgaaagttcaaggccaagcagctcaccccacggatcctggaagcccaccagaatgtggcccagttgtcgctggcagaggcccagctgcgcttcatccaggcctggcagtccctgcccgacttcggcatctcctatgtcatggtcaggttcaagggcagcaggaaagacgagatcctgggcatcgccaacaaccgactgatccgcatcgacttggccgtgggcgacgtggtcaagacctggcgtttcagcaacatgcgccagtggaatgtcaactgggacatccggcaggtggccatcgagtttgatgaacacatcaatgtggccttcagctgcgtgtctgccagctgccgaattgtacacgagtatatcgggggctacattttcctgtcgacgcgggagcgggcccgtggggaggagctggatgaagacctcttcctgcagctcaccgggggccatgaggccttctgagggctgtctgattgcccctgccctgctcaccaccctgtcacagccactcccaagcccacacccacaggggctcactgccccacacccgctccaggcaggcacccagctgggcatttcacctgctgtcactgactttgtgcaggccaaggacctggcagggccagacgctgtaccatcacccaggccagggatgggggtgggggtccctgagctcatgtggtgccccctttccttgtctgagtggctgaggctgatacccctgacctatctgcagtcccccagcacacaaggaagaccagatgtagctacaggatgatgaaacatggtttcaaacgagttctttcttgttactttttaaaatttcttttttataaattaatattttattgttggatcctcaaaaaaaaaaaaaaaaaa

SEQ ID NO: 176 - protein, 663 aa, Homo sapiens
MAGMKTASGDYIDSSWELRVFVGEEDPEAESVTLRVTGESHIGGVLLKIVEQINRKQDWSDHAIWWEQKRQWLLQTHWTLDKYGILADARLFFGPQHRPVILRLPNRRALRLRASFSQPLFQAVAAICRLLSIRHPEELSLLRAPEKKEKKKKEKEPEEELYDLSKVVLAGGVAPALFRGMPAHFSDSAQTEACYHMLSRPQPPPDPLLLQRLPRPSSLSDKTQLHSRWLDSSRCLMQQGIKAGDALWLRFKYYSFFDLDPKTDPVRLTQLYEQARWDLLLEEIDCTEEEMMVFAALQYHINKLSQSGEVGEPAGTDPGLDDLDVALSNLEVKLEGSAPTDVLDSLTTIPELKDHLRIFRPRKLTLKGYRQHWVVFKETTLSYYKSQDEAPGDPIQQLNLKGCEVVPDVNVSGQKFCIKLLVPSPEGMSEIYLRCQDEQQYARWMAGCRLASKGRTMADSSYTSEVQAILAFLSLQRTGSGGPGNHPHGPDASAEGLNPYGLVAPRFQRKFKAKQLTPRILEAHQNVAQLSLAEAQLRFIQAWQSLPDFGISYVMVRFKGSRKDEILGIANNRLIRIDLAVGDVVKTWRFSNMRQWNVNWDIRQVAIEFDEHINVAFSCVSASCRIVHEYIGGYIFLSTRERARGEELDEDLFLQLTGGHEAF

SEQ ID NO: 177 - DNA, 2590 bp, Mus musculus
gtggagccctctgcgtgctggcagtgtgcttcctgtacccagcaacagcccgccctggggagggactagtacaactttcatgataaggccactacaggctgacctctgaaggaagcaactgagcaggaccaggccagaccagggtaacaggtgtcccactgccacctgcagctgcagcccgttgcaggctagcagaaacagccgcagccatggcgggtatgaagacagcctccggggactatatcgactcttcctgggagctgagggtgtttgtgggcgaggaggaccctgaggcccagtctgtcacactccgagtcacgggggagtcgcacattggtggggtacttctgaagatcgtggaggaaatcaatcgcaagcaggactggtctgaccatgccatttggtgggagcagaagagacagtggctgctgcagacacactggacgctggacaagtacgggattctggccgatgcccgcctcttctttgggccacagcaccgacctgtcatcctgcgactgcccaacagacgtgtgctgcggcttcgggccagtttctccaagcccctcttccaaacggtggctgccatctgccgcctcctcagtatcaggcacccagaggagctgtctctgctgcgtgctccagagaagaaggagaagaagaagaaggagaaggagcctgaagaggaggtgcatgacctgacaaaggttgtcttagctggcggtgtggcacccactttattcagaggcatgccagcacacttctcggacagcgcccagactgaggcttgttaccacatgctgagccggccacagccggcacctgaccctctcctgctccagcgcctgccaaggcccagctccctgcctgacaagacccagctccacagcaggtggctggattcatctcggtgcctcatgcagcaaggtatcaaggccggggatgtgctttggctgcgatttaagtactacagcttttttgacctggatcccaagacagaccctgtgcggctgacccagctgtatgagcaggcccgctgggacttactgacagaggagatcgactgcactgaagaagagatgatggtgtttgctgccctgcagtaccacatcaacaaactgaccctgagcggggatgtgggtgagctggcctctggggacctgggactggatgacctggatgcagccctgaacaacctggaggtgaagctgaaggggtcagcaccctcagacatgctggatagtctcactaccatcccagaactcaaggaccatctccggatcttccggccccggaagctgaccctgaagggctaccgccagtactgggtggtatttaaggacaccacactgtcctactataagagccaagatgaagcaccgggggaccctacccagcagctcaacctcaagggctgtgaggtggtccctgatgtcaatgtctctggccagaagttctgcatcaaactcctggtaccctcaccagagggcatgagtgagatctacctgaggtgccaggatgaacagcagtacgcacagtggatggctgcctgccgactggcctccaagggccgcaccatggcggacagcagctatgccagcgaggtgcaggccattctggccttcctcagcctgcagcgggcaggtggtagcaatggaggctcagggaacaaacctcaaggtcctgaagcccctgctgagggccttaacccctatggcctcgtggctcctcggttccagcgaaagttcaaggccaagcagctcaccccaaggatcctggaagctcaccaaaacgtggcccaactctcactgaccgaggcccagctgcgctttatccaggcctggcaatccttgcccgactttggcatctcctatgtgatggtcaggttcaagggcagcaggaaagatgagatcctaggcattgccaacaaccgactcatccggattgatctggccgtgggtgacgtggtcaagacctggcgcttcagcaacatgcggcaatggaacgtcaactgggacatacggcaggtggccattgagttcgatgaacacatcaatgtggccttcagctgtgtgtctgctagctgccgcatcgtgcacgagtacatcgggggttacatcttcctgtccacccgagagcgggcccgaggggaagagctggatgaggatctgttcctgcagcttacaggaggccatgaggccttctgagggcagcccctgctccactcaccacctccagggaccccccaaaggccacacccacctgaacacactgctccatcactcccgggatgtacactgctgggcaacttcacttgttgtcaccaggcaggccagggccctcgctggggtaggtgctaccaccagccagcctagggatgatgggccctgagccacacagagcccctcctctcaccctgttggcagaagctcacacccccgacctctatgtagtccctaagcacacgacgaatgccagacacggatgaggaaccacaaatcctggtttgaagctggactttctttctgtgtctgtttcaggttttttaataaataaatattttattgttggatctttcttcttcctcctc

SEQ ID NO: 178 - DNA, 2587 bp, Mus musculus
gtggagccctctgcgtgctggcagtgtgcttcctgtacccagcaacagcccgccctggggagggactagtacaactttcatgataaggccactacaggctgacctctgaaggaagcaactgagcaggaccaggccagaccagggtaacaggtgtcccactgccacctgcagctgcagcccgttgcaggctagaaacagccgcagccatggcgggtatgaagacagcctccggggactatatcgactcttcctgggagctgagggtgtttgtgggcgaggaggaccctgaggcccagtctgtcacactccgagtcacgggggagtcgcacattggtggggtacttctgaagatcgtggaggaaatcaatcgcaagcaggactggtctgaccatgccatttggtgggagcagaagagacagtggctgctgcagacacactggacgctggacaagtacgggattctggccgatgcccgcctcttctttgggccacagcaccgacctgtcatcctgcgactgcccaacagacgtgtgctgcggcttcgggccagtttctccaagcccctcttccaaacggtggctgccatctgccgcctcctcagtatcaggcacccagaggagctgtctctgctgcgtgctccagagaagaaggagaagaagaagaaggagaaggagcctgaagaggaggtgcatgacctgacaaaggttgtcttagctggcggtgtggcacccactttattcagaggcatgccagcacacttctcggacagcgcccagactgaggcttgttaccacatgctgagccggccacagccggcacctgaccctctcctgctccagcgcctgccaaggcccagctccctgcctgacaagacccagctccacagcaggtggctggattcatctcggtgcctcatgcagcaaggtatcaaggccggggatgtgctttggctgcgatttaagtactacagcttttttgacctggatcccaagacagaccctgtgcggctgacccagctgtatgagcaggcccgctgggacttactgacagaggagatcgactgcactgaagaagagatgatggtgtttgctgccctgcagtaccacatcaacaaactgaccctgagcggggatgtgggtgagctggcctctggggacctgggactggatgacctggatgcagccctgaacaacctggaggtgaagctgaaggggtcagcaccctcagacatgctggatagtctcactaccatcccagaactcaaggaccatctccggatcttccggccccggaagctgaccctgaagggctaccgccagtactgggtggtatttaaggacaccacactgtcctactataagagccaagatgaagcaccgggggaccctacccagcagctcaacctcaagggctgtgaggtggtccctgatgtcaatgtctctggccagaagttctgcatcaaactcctggtaccctcaccagagggcatgagtgagatctacctgaggtgccaggatgaacagcagtacgcacagtggatggctgcctgccgactggcctccaagggccgcaccatggcggacagcagctatgccagcgaggtgcaggccattctggccttcctcagcctgcagcgggcaggtggtagcaatggaggctcagggaacaaacctcaaggtcctgaagcccctgctgagggccttaacccctatggcctcgtggctcctcggttccagcgaaagttcaaggccaagcagctcaccccaaggatcctggaagctcaccaaaacgtggcccaactctcactgaccgaggcccagctgcgctttatccaggcctggcaatccttgcccgactttggcatctcctatgtgatggtcaggttcaagggcagcaggaaagatgagatcctaggcattgccaacaaccgactcatccggattgatctggccgtgggtgacgtggtcaagacctggcgcttcagcaacatgcggcaatggaacgtcaactgggacatacggcaggtggccattgagttcgatgaacacatcaatgtggccttcagctgtgtgtctgctagctgccgcatcgtgcacgagtacatcgggggttacatcttcctgtccacccgagagcgggcccgaggggaagagctggatgaggatctgttcctgcagcttacaggaggccatgaggccttctgagggcagcccctgctccactcaccacctccagggaccccccaaaggccacacccacctgaacacactgctccatcactcccgggatgtacactgctgggcaacttcacttgttgtcaccaggcaggccagggccctcgctggggtaggtgctaccaccagccagcctagggatgatgggccctgagccacacagagcccctcctctcaccctgttggcagaagctcacacccccgacctctatgtagtccctaagcacacgacgaatgccagacacggatgaggaaccacaaatcctggtttgaagctggactttctttctgtgtctgtttcaggttttttaataaataaatattttattgttggatctttcttcttcctcctc

SEQ ID NO: 179 - protein, 665 aa, Mus musculus
MAGMKTASGDYIDSSWELRVFVGEEDPEAQSVTLRVTGESHIGGVLLKIVEEINRKQDWSDHAIWWEQKRQWLLQTHWTLDKYGILADARLFFGPQHRPVILRLPNRRVLRLRASFSKPLFQTVAAICRLLSIRHPEELSLLRAPEKKEKKKKEKEPEEEVHDLTKVVLAGGVAPTLFRGMPAHFSDSAQTEACYHMLSRPQPAPDPLLLQRLPRPSSLPDKTQLHSRWLDSSRCLMQQGIKAGDVLWLRFKYYSFFDLDPKTDPVRLTQLYEQARWDLLTEEIDCTEEEMMVFAALQYHINKLTLSGDVGELASGDLGLDDLDAALNNLEVKLKGSAPSDMLDSLTTIPELKDHLRIFRPRKLTLKGYRQYWVVFKDTTLSYYKSQDEAPGDPTQQLNLKGCEVVPDVNVSGQKFCIKLLVPSPEGMSEIYLRCQDEQQYAQWMAACRLASKGRTMADSSYASEVQAILAFLSLQRAGGSNGGSGNKPQGPEAPAEGLNPYGLVAPRFQRKFKAKQLTPRILEAHQNVAQLSLTEAQLRFIQAWQSLPDFGISYVMVRFKGSRKDEILGIANNRLIRIDLAVGDVVKTWRFSNMRQWNVNWDIRQVAIEFDEHINVAFSCVSASCRIVHEYIGGYIFLSTRERARGEELDEDLFLQLTGGHEAF

SEQ ID NO: 180 - DNA, 1263 bp, Homo sapiens
ttcctttctctctcagctctccgtctctctttctctctcagcctctttctttctccctgtctcccccactgtcagcacctcttctgtgtggtgagtggaccgcttaccccactaggtgaagatgtcagcccaggagagctgcctcagcctcatcaagtacttcctcttcgttttcaacctcttcttcttcgtcctcggcagcctgatcttctgcttcggcatctggatcctcattgacaagaccagcttcgtgtcctttgtgggcttggccttcgtgcctctgcagatctggtccaaagtcctggccatctcaggaatcttcaccatgggcatcgccctcctgggttgtgtgggggccctcaaggagctccgctgcctcctgggcctgtattttgggatgctgctgctcctgtttgccacacagatcaccctgggaatcctcatctccactcagcgggcccagctggagcgaagcttgcgggacgtcgtagagaaaaccatccaaaagtacggcaccaaccccgaggagaccgcggccgaggagagctgggactatgtgcagttccagctgcgctgctgcggctggcactacccgcaggactggttccaagtcctcatcctgagaggtaacgggtcggaggcgcaccgcgtgccctgctcctgctacaacttgtcggcgaccaacgactccacaatcctagataaggtgatcttgccccagctcagcaggcttggacacctggcgcggtccagacacagtgcagacatctgcgctgtccctgcagagagccacatctaccgcgagggctgcgcgcagggcctccagaagtggctgcacaacaaccttatttccatagtgggcatttgcctgggcgtcggcctactcgagctcgggttcatgacgctctcgatattcctgtgcagaaacctggaccacgtctacaaccggctcgctcgataccgttaggccccgccctccccaaagtcccgccccgcccccgtcacgtgcgctgggcacttccctgctgcctgtaaatatttgtttaatccccagttcgcctggagccctccgccttcacattcccctggggacccacgtggctgcgtgcccctgctgctgtcacctctcccacgggacctggggctttcgtccacagcttcctgtccccatctgtcggcctaccaccacccacaagattatttttcacccaaacctcaaataaatcccctgcgtttttggtaaaaaaaaaaaaaaaaaaaaaa

SEQ ID NO: 181 - protein, 281 aa, Homo sapiens
MSAQESCLSLIKYFLFVFNLFFFVLGSLIFCFGIWILIDKTSFVSFVGLAFVPLQIWSKVLAISGIFTMGIALLGCVGALKELRCLLGLYFGMLLLLFATQITLGILISTQRAQLERSLRDVVEKTIQKYGTNPEETAAEESWDYVQFQLRCCGWHYPQDWFQVLILRGNGSEAHRVPCSCYNLSATNDSTILDKVILPQLSRLGHLARSRHSADICAVPAESHIYREGCAQGLQKWLHNNLISIVGICLGVGLLELGFMTLSIFLCRNLDHVYNRLARYR

SEQ ID NO: 182 - DNA, 1229 bp, Homo sapiens
ttcctttctctctcagctctccgtctctctttctctctcagcctctttctttctccctgtctcccccactgtcagcacctcttctgtgtggtgagtggaccgcttaccccactaggtgaagatgtcagcccaggagagctgcctcagcctcatcaagtcctcggcagcctgatcttctgcttcggcatctggatcctcattgacaagaccagcttcgtgtcctttgtgggcttggccttcgtgcctctgcagatctggtccaaagtcctggccatctcaggaatcttcaccatgggcatcgccctcctgggttgtgtgggggccctcaaggagctccgctgcctcctgggcctgtattttgggatgctgctgctcctgtttgccacacagatcaccctgggaatcctcatctccactcagcgggcccagctggagcgaagcttgcgggacgtcgtagagaaaaccatccaaaagtacggcaccaaccccgaggagaccgcggccgaggagagctgggactatgtgcagttccagctgcgctgctgcggctggcactacccgcaggactggttccaagtcctcatcctgagaggtaacgggtcggaggcgcaccgcgtgccctgctcctgctacaacttgtcggcgaccaacgactccacaatcctagataaggtgatcttgccccagctcagcaggcttggacacctggcgcggtccagacacagtgcagacatctgcgctgtccctgcagagagccacatctaccgcgagggctgcgcgcagggcctccagaagtggctgcacaacaaccttatttccatagtgggcatttgcctgggcgtcggcctactcgagctcgggttcatgacgctctcgatattcctgtgcagaaacctggaccacgtctacaaccggctcgctcgataccgttaggccccgccctccccaaagtcccgccccgcccccgtcacgtgcgctgggcacttccctgctgcctgtaaatatttgtttaatccccagttcgcctggagccctccgccttcacattcccctggggacccacgtggctgcgtgcccctgctgctgtcacctctcccacgggacctggggctttcgtccacagcttcctgtccccatctgtcggcctaccaccacccacaagattatttttcacccaaacctcaaataaatcccctgcgtttttggtaaaaaaaaaaaaaaaaaaaaaa

SEQ ID NO: 183 - protein, 213 aa, Homo sapiens
MGIALLGCVGALKELRCLLGLYFGMLLLLFATQITLGILISTQRAQLERSLRDVVEKTIQKYGTNPEETAAEESWDYVQFQLRCCGWHYPQDWFQVLILRGNGSEAHRVPCSCYNLSATNDSTILDKVILPQLSRLGHLARSRHSADICAVPAESHIYREGCAQGLQKWLHNNLISIVGICLGVGLLELGFMTLSIFLCRNLDHVYNRLARYR

SEQ ID NO: 184 - DNA, 1277 bp, Mus musculus
tgtctgtgaggttgaactctgcagaaacaaccttgaagtcccaggacccacgtgagtggaagtccatcagaagcccctgtgcgccctgcctgagctatggacacctgcgaggaacccattgtgtccctggcacccacatattccaaggaccctcaggcgaagatgtccgcccaagagagttgcctcagcctcatcaagtacttcctcttcgttttcaacctcttcttctttgtactaggcggcctgattttctgcttcggcacctggatcctcattgacaagaccagcttcgtgtcctttgtgggtttgtccttcgtgccactgcagacttggtccaaggtcctggctgtctcaggtgtcctcaccatggccctggctctcctgggctgtgtgggggctctaaaggagctgcgctgtctcctgggcctgtattttggaatgctgctgctcctgtttgccacacagattaccctgggcatcctcatttccactcagcgggtccggctggagcgaagggtgcaggaattggtgttgaggacgatccagagctaccgcacgaatccggatgagacagcagccgaggagagttgggactatgcacagttccagctgcgctgctgcggctggcaatctccgcgggactggaacaaggcccagatgctgaaagcgaacgagtctgaggagccctttgtgccctgctcctgctacaactccacggcgaccaatgactccaccgtctttgataagctctttttctcccagctaagccggttggggccgcgggcgaagctgaggcagactgctgacatatgtgcactccctgcaaaagctcacatctaccgtgagggctgcgcgcagagcctccagaagtggctgcacaacaatatcatctccatagtgggaatctgtctgggagtcggtcttcttgagctcggcttcatgacgctctcaatattcctgtgtagaaatctggatcacgtctatgaccggctggcccggtaccgctaggccccagcccacccatcggcacccacgcacctccatgcagtcaggaaatgtttccttcctggttggtcacaggcttggagcccatgcctcaggcctcatcccctggggacccagctgtctgccctatcgacagccttcactttccccacatggccagggacttttgtgcccagcttccttcccttcctggctccctcctccccacaccatctgtctgccacctcccacatgacacctcaaataaatcccctttgggtttttggcttttt

SEQ ID NO: 185 - protein, 303 aa, Mus musculus
MDTCEEPIVSLAPTYSKDPQAKMSAQESCLSLIKYFLFVFNLFFFVLGGLIFCFGTWILIDKTSFVSFVGLSFVPLQTWSKVLAVSGVLTMALALLGCVGALKELRCLLGLYFGMLLLLFATQITLGILISTQRVRLERRVQELVLRTIQSYRTNPDETAAEESWDYAQFQLRCCGWQSPRDWNKAQMLKANESEEPFVPCSCYNSTATNDSTVFDKLFFSQLSRLGPRAKLRQTADICALPAKAHIYREGCAQSLQKWLHNNIISIVGICLGVGLLELGFMTLSIFLCRNLDHVYDRLARYR

SEQ ID NO: 186 - DNA, 1202 bp, Mus musculus
tgtctgtgaggttgaactctgcagaaacaaccttgaagtcccaggacccacgtgagtggaagtccatcagaagcccctgtgcgccctgcctgagctatggacacctgcgaggaacccattgtgtccctggcacccacatattccaaggaccctcaggtactaggcggcctgattttctgcttcggcacctggatcctcattgacaagaccagcttcgtgtcctttgtgggtttgtccttcgtgccactgcagacttggtccaaggtcctggctgtctcaggtgtcctcaccatggccctggctctcctgggctgtgtgggggctctaaaggagctgcgctgtctcctgggcctgtattttggaatgctgctgctcctgtttgccacacagattaccctgggcatcctcatttccactcagcgggtccggctggagcgaagggtgcaggaattggtgttgaggacgatccagagctaccgcacgaatccggatgagacagcagccgaggagagttgggactatgcacagttccagctgcgctgctgcggctggcaatctccgcgggactggaacaaggcccagatgctgaaagcgaacgagtctgaggagccctttgtgccctgctcctgctacaactccacggcgaccaatgactccaccgtctttgataagctctttttctcccagctaagccggttggggccgcgggcgaagctgaggcagactgctgacatatgtgcactccctgcaaaagctcacatctaccgtgagggctgcgcgcagagcctccagaagtggctgcacaacaatatcatctccatagtgggaatctgtctgggagtcggtcttcttgagctcggcttcatgacgctctcaatattcctgtgtagaaatctggatcacgtctatgaccggctggcccggtaccgctaggccccagcccacccatcggcacccacgcacctccatgcagtcaggaaatgtttccttcctggttggtcacaggcttggagcccatgcctcaggcctcatcccctggggacccagctgtctgccctatcgacagccttcactttccccacatggccagggacttttgtgcccagcttccttcccttcctggctccctcctccccacaccatctgtctgccacctcccacatgacacctcaaataaatcccctttgggtttttggcttttt

SEQ ID NO: 187 - protein, 278 aa, Mus musculus
MDTCEEPIVSLAPTYSKDPQVLGGLIFCFGTWILIDKTSFVSFVGLSFVPLQTWSKVLAVSGVLTMALALLGCVGALKELRCLLGLYFGMLLLLFATQITLGILISTQRVRLERRVQELVLRTIQSYRTNPDETAAEESWDYAQFQLRCCGWQSPRDWNKAQMLKANESEEPFVPCSCYNSTATNDSTVFDKLFFSQLSRLGPRAKLRQTADICALPAKAHIYREGCAQSLQKWLHNNIISIVGICLGVGLLELGFMTLSIFLCRNLDHVYDRLARYR

SEQ ID NO: 188 - DNA, 1226 bp, Mus musculus
tttgtgcctctcagtctctgtctttctttgcccactattccccttcccccctgcggccaacacctcttctgtctgggtttctcgagtgggtcattccccatctaggcgaagatgtccgcccaagagagttgcctcagcctcatcaagtacttcctcttcgttttcaacctcttcttctttgtactaggcggcctgattttctgcttcggcacctggatcctcattgacaagaccagcttcgtgtcctttgtgggtttgtccttcgtgccactgcagacttggtccaaggtcctggctgtctcaggtgtcctcaccatggccctggctctcctgggctgtgtgggggctctaaaggagctgcgctgtctcctgggcctgtattttggaatgctgctgctcctgtttgccacacagattaccctgggcatcctcatttccactcagcgggtccggctggagcgaagggtgcaggaattggtgttgaggacgatccagagctaccgcacgaatccggatgagacagcagccgaggagagttgggactatgcacagttccagctgcgctgctgcggctggcaatctccgcgggactggaacaaggcccagatgctgaaagcgaacgagtctgaggagccctttgtgccctgctcctgctacaactccacggcgaccaatgactccaccgtctttgataagctctttttctcccagctaagccggttggggccgcgggcgaagctgaggcagactgctgacatatgtgcactccctgcaaaagctcacatctaccgtgagggctgcgcgcagagcctccagaagtggctgcacaacaatatcatctccatagtgggaatctgtctgggagtcggtcttcttgagctcggcttcatgacgctctcaatattcctgtgtagaaatctggatcacgtctatgaccggctggcccggtaccgctaggccccagcccacccatcggcacccacgcacctccatgcagtcaggaaatgtttccttcctggttggtcacaggcttggagcccatgcctcaggcctcatcccctggggacccagctgtctgccctatcgacagccttcactttccccacatggccagggacttttgtgcccagcttccttcccttcctggctccctcctccccacaccatctgtctgccacctcccacatgacacctcaaataaatcccctttgggtttttggcttttt

SEQ ID NO: 189 - protein, 281 aa, Mus musculus
MSAQESCLSLIKYFLFVFNLFFFVLGGLIFCFGTWILIDKTSFVSFVGLSFVPLQTWSKVLAVSGVLTMALALLGCVGALKELRCLLGLYFGMLLLLFATQITLGILISTQRVRLERRVQELVLRTIQSYRTNPDETAAEESWDYAQFQLRCCGWQSPRDWNKAQMLKANESEEPFVPCSCYNSTATNDSTVFDKLFFSQLSRLGPRAKLRQTADICALPAKAHIYREGCAQSLQKWLHNNIISIVGICLGVGLLELGFMTLSIFLCRNLDHVYDRLARYR

SEQ ID NO: 190 - DNA, 1927 bp, Homo sapiens
attctgtggcttgatgtggctttgtcagttactgcctccccacctcccgggacttcccactgcctctttagcacaaatcggacttgaacaaaaacaactctttttccatgggaccaattataaaaagaatggctttgcactgagcagctcagtctactggtctcatcagtgaaaggcttgtgaaaatttctggaaagagcattggctggcttgttcatctctctgtttggtcagttgctgtgtttctgccggatcagatgagcagattggttagtgaaggtcagtgtgagaagaagattgtttctgagcttgagaagcttctggaggattgaagagtatttgaagtctgtgtcaaacatccatatcataagtggaattttggagatattcaaagaatgctgtcagaagggtatctcagtggacttgagtactggaatgacatccactggagttgtgcctcttataatgagcaggtggctggggaaaaggaagaggagacaaattctgttgctaccctttcctattcctctgtggatgaaacacaagtcagaagtctctacgtgagctgcaaatcatctggcaagtttatctcttcagtgcattcaagagagagccaacatagcagaagtcagagagtcacagtgctgcagacaaaccccaatcctgtgtttgaaagcccaaacttggctgcagttgaaatatgtagagatgccagcagagagacctacttggttccatcttcttgcaaaagtatttgcaagaattataatgacttacagattgcagggggccaggtgatggccattaattcagtgacaacagattttccctctgagagcagttttgaatatggccctttgctgaagtcatctgagattcctttacccatggaggattccatttctactcagcccagtgactttccccaaaaacctatccagcggtactcatcctattggagaataacaagcatcaaagagaaaagcagcttgcaaatgcagaatcctatttctaatgcagttctgaatgagtacctggagcagaaggttgtggagttatataaacagtacattatggacaccgtgtttcatgacagttctcctacccagattctggcgtctgaactcatcatgacaagtgtagaccaaatcagtcttcaagtgtctagagagaagaatctggagacctcaaaagccagagatatagtctttagccgcctattgcaattgatgtcaactgaaattactgaaattagcactcctagtctccatatttctcagtatagcaatgtaaatccatagagaggatgcttccattactgtctcgcatttacttaaacatgaagcaacactttatccatttattctgagaatgtgcaggaggggttagtgaaggggaattaagggctagagaagtaaagatcagctggaagtcatgtgtgaatcatggagaaatctcataatattacacttgatgaaggaatatggtaagaggagccataaggaatgatttcaaagagaggtgtgtacagcaaggaagcaaaaataaaaatgatcaaaaaagaaacggttaattcatttgaagaaacataggaattaaaaaagaagacagtcaaatgagatgaaacaaaaaggccaaaaggtggccgggtgtagtggctcacgcctgtaatcccagcatttcggaggctgatgtgggtggattacctgacgtcaggaattcgagaccggcctggccaatatggtgaaaccccatctctactaaaaatacaaaaaattagctggacatggtggtgggtacctgtaatcccagctactagggaggctgaggcaggagaatctcttgaacctgagaggcagaggttgcagtgagccgaggtcgctccattgcactccagcctgggcaacaagagtgagactcccgtctc

SEQ ID NO: 191 - protein, 301 aa, Homo sapiens
MLSEGYLSGLEYWNDIHWSCASYNEQVAGEKEEETNSVATLSYSSVDETQVRSLYVSCKSSGKFISSVHSRESQHSRSQRVTVLQTNPNPVFESPNLAAVEICRDASRETYLVPSSCKSICKNYNDLQIAGGQVMAINSVTTDFPSESSFEYGPLLKSSEIPLPMEDSISTQPSDFPQKPIQRYSSYWRITSIKEKSSLQMQNPISNAVLNEYLEQKVVELYKQYIMDTVFHDSSPTQILASELIMTSVDQISLQVSREKNLETSKARDIVFSRLLQLMSTEITEISTPSLHISQYSNVNP

SEQ ID NO: 192 - DNA, 3835 bp, Mus musculus
ctcttgttccataggatcagtgatactaagaagggggcagatcttagtagcctcttcagtgagagacttgagagctttttgaaaagagccctgtctggctagttcttctctattagatcagtcattgtgttgctgcaggatccaaggagcagactccggtgaagaatgctatcagaaggatatctcagtggacttacctactggaatgacattcattggaattgtgcatcttataatgaaccggtggctggggaccaaggcaaagagacaagttctgttgctgctctttcatattcctctgtggatgaaacacaagttcaaagtctttatgtgagctgcaaatcctctgggaagtttatttcatcagtgcatgcaagggcgagtcagcacagcagaagccagagcagaacagtgctgcaggcaaacagcaaccctgtatttgaaagtccaactttagctgcagttggtatatgcagagatgtgatcagggagacctacttggttccaccttcttgtaaaagtatttgcaaaaattacaacgacttacatattgcagggggacaggtgatggccattaactcagtaatggcaaatttcccctctgagagcagctttgaagatggtcctttgctaaagtcatctgagatttctttgtccatggaggattccacttccactcagctcactgaacttcccctcaaacctatccagcggtactcatcctactggaggataaccagcatcaaagagaaaagcagcctgcaaatgcagaagcctatttcaaatgcagtgctcaatgagtacctggagcagaaggtggtggaattgtataagcaatatattatggacactgtgtttcatgacagttctcctacccagattctggcatcagaattcatcatgacgaatgtagatcaaattagtcttcaagtgtctaaagagaagaacctggacacttcaaaagtcaaggacatagttattagccacctgttgcagttggtatcatctgagatcagcacccctagtcttcatatttctcagtatagcaatataactccatagagaaggctcctgtcaattccccttattcctatgaatcccaaggcactattgtattaatttgatcagaggatgtgatggagggaattctggaagggaattaacaactagtaaaggacactttgagaaatcacatatggaaaggaacaggaagaggaaccaaaagaatggtttcaaggacaagtttatacagaatcagagcaaaattaaaaatgatcacagagagaaggaaggtactgtgattcaattttaggagttctgaaactggaagttaagccaaatcaggaacaaaaggaaacactatggcaaactagaaagtcgatggatttgagaattgggaattaaacacctgtttcctatttagatacatttatctaggttgtttcttctggaaagaaatggactacaagatggttgttaaattcaggtggactgacatttttccaagtataagcttgtatttcttttcctctgtgctatatcagtaagtcatgtagatatactctttataaatattaaatgaatgacaaacaaatctcagttgtttaaacattttttttttttgcaacaaggctctattagctcaggctggttttacaatccttacatagccgatgatcttgaattccttattctcttgcttctatcccacaagtgctggtattataggtatgtatcatcaaatctggatgtgtttttatttgaaatgaaaaggttcagccacaagactatgacttaaatctcctaattctatttagtgatagagatagcagtgtttcaacggaaaacctcctattgtgaacattgaagcattttatttcactgagtgtgattttcatggtgctatgaggttcaaaaggattatgaatactttgccccccatttccctttttcatgtgttcttctgacctggagccagaaaagggtcttctgattgttctatacaagaccaaggactccataatttcaatttctgtatatttgtttactaaaacagtagctttacatgtgtattactgtcttgatcttttattcagctcaggacttagaaaactatgagcctttggtcaaatctaactttatgatagctttggactctcgtgagctaaggataggttttccttttctcttttcttttttccctttcttttccttttttccttttctttttcttgagggagggcctctttattgtatagctccagctgtctggaactccctatgtagaccaggctggtgtctaacacacagagatttgtctgcctgtgcttcccacatgctaggaggattaagggcatgtgccattatatcacacttggcatgttttattatttttaattttaatatattttaaaagcccaaaagcttaagttaaaaatactttagagcatatgaaaattatatgaaatttaaaattgaaattcagtgtatataaactagactttatttgtttatttatttatttatttatttattggcagtgctggtgatggaattcaaggccttattcatgacaggcaagttctataacatattccatgctgcctactaaattttatttgtttgtttatattttatatagtttgtagttgcttttacataagaatggtcgaacagacatgacggagaacatatgacacaacaaagcttaatatttctttttaccatctggctgtttacagtgatgtttgccaactctgttcaatgacagtgtcttgcccaaacttgatttaggttttccaggaagcagactttcgaaaggacattggggagcatttttatccttatggggaataggttccctctgtgatggaatgagggaagcaaatccagatgttaccagaaagagttagggtgaatcttcaaaatagttccaaattgaaacaagtgagtaggcgtctgttctcaagcgtctaagtgcaaggtgcataccttgactgatggccacaggtctatggagtggagtggagtggagtggagtggagtggagtgaatagctgcagcctctggtcaggagcctggtgtctaggagcatggaaaaaggcctaccattccagtgcaggctaaggtcacctgctgggttaccggggttttaaacctagctcaaccagaaaccaggctgcctctcatagtcccacaactaatgacccaaagtccattacatccacacccagccaaattttctactatcattcttgaaattatgtgaggttctataactgtacataaataaataaataaaagcactgcagaaatctgaaatggctttagtaaaattttctgccacaatgggactacaacagtttagattcagaaattcagtcttcctttttttctttttaaaaaattttattgggttcattgattctaccaagactagtctgcacaggggagagtgtgtcactctatgaaagactaatatttcctaaaattgtgaggcagagaaaattctttccttaagttgcttctgtgtggtgtttgttatggcaataagaaattaatcgagccatcttagttcccagatccctctgagactatctgcacaggtgagagtatggactacagaagctaacagcttccgggacagaccctgtttcaggttctcatcttctgccaggaggcagatctgattgccagatatctgtgaacctttcctgcaagaggagagcttgcatgcagtgagtgctctgaccactgaaactcagaagagagctagtcccccaggtctgctgatagagcgtaacagaatcacctgaggaacaagctctaaccagag

SEQ ID NO: 193 - protein, 298 aa, Mus musculus
MLSEGYLSGLTYWNDIHWNCASYNEPVAGDQGKETSSVAALSYSSVDETQVQSLYVSCKSSGKFISSVHARASQHSRSQSRTVLQANSNPVFESPTLAAVGICRDVIRETYLVPPSCKSICKNYNDLHIAGGQVMAINSVMANFPSESSFEDGPLLKSSEISLSMEDSTSTQLTELPLKPIQRYSSYWRITSIKEKSSLQMQKPISNAVLNEYLEQKVVELYKQYIMDTVFHDSSPTQILASEFIMTNVDQISLQVSKEKNLDTSKVKDIVISHLLQLVSSEISTPSLHISQYSNITP

SEQ ID NO: 194 - DNA, 1155 bp, Homo sapiens; identical to SEQ ID NO: 73

SEQ ID NO: 195 - protein, 243 aa, Homo sapiens; identical to SEQ ID NO: 74

SEQ ID NO: 196 - DNA, 1537 bp, Homo sapiens; identical to SEQ ID NO: 75

SEQ ID NO: 197 - protein, 252 aa, Homo sapiens; identical to SEQ ID NO: 76

SEQ ID NO: 198 - DNA, 1205 bp, Mus musculus; identical to SEQ ID NO: 77

SEQ ID NO: 199 - protein, 240 aa, Mus musculus; identical to SEQ ID NO: 78

SEQ ID NO: 200 - DNA, 938 bp, Mus musculus; identical to SEQ ID NO: 79

SEQ ID NO: 201 - protein, 151 aa, Mus musculus; identical to SEQ ID NO: 80

SEQ ID NO: 202 - DNA, 8296 bp, Homo sapiens; identical to SEQ ID NO: 53

SEQ ID NO: 203 - protein, 345 aa, Homo sapiens; identical to SEQ ID NO: 54

SEQ ID NO: 204 - DNA, 8245 bp, Homo sapiens; identical to SEQ ID NO: 55

SEQ ID NO: 205 - protein, 328 aa, Homo sapiens; identical to SEQ ID NO: 56

SEQ ID NO: 206 - DNA, 8147 bp, Homo sapiens; identical to SEQ ID NO: 57

SEQ ID NO: 207 - protein, 272 aa, Homo sapiens; identical to SEQ ID NO: 58

SEQ ID NO: 208 - DNA, 7903 bp, Homo sapiens; identical to SEQ ID NO: 59

SEQ ID NO: 209 - protein, 214 aa, Homo sapiens; identical to SEQ ID NO: 60

SEQ ID NO: 210 - DNA, 8261 bp, Homo sapiens; identical to SEQ ID NO: 61

SEQ ID NO: 211 - protein, 339 aa, Homo sapiens; identical to SEQ ID NO: 62

SEQ ID NO: 212 - DNA, 3290 bp, Mus musculus; identical to SEQ ID NO: 63

SEQ ID NO: 213 - protein, 329 aa, Mus musculus; identical to SEQ ID NO: 64

SEQ ID NO: 214 - DNA, 3520 bp, Mus musculus; identical to SEQ ID NO: 65

SEQ ID NO: 215 - protein, 140 aa, Mus musculus; identical to SEQ ID NO: 66

SEQ ID NO: 216 - DNA, 3287 bp, Mus musculus; identical to SEQ ID NO: 67

SEQ ID NO: 217 - protein, 328 aa, Mus musculus; identical to SEQ ID NO: 68

SEQ ID NO: 218 - DNA, 21 bp, Artificial Sequence
  Description of Artificial Sequence: Synthetic oligonucleotide
  Description of Combined DNA/RNA Molecule: Synthetic oligonucleotide
acaaguaaacugcugacgatt

SEQ ID NO: 219 - DNA, 21 bp, Artificial Sequence
  Description of Artificial Sequence: Synthetic oligonucleotide
  Description of Combined DNA/RNA Molecule: Synthetic oligonucleotide
guaaacugcugacgaugcatt

SEQ ID NO: 220 - DNA, 21 bp, Artificial Sequence
  Description of Artificial Sequence: Synthetic oligonucleotide
  Description of Combined DNA/RNA Molecule: Synthetic oligonucleotide
ucgcauggcuggauuuacctt

SEQ ID NO: 221 - DNA, 21 bp, Artificial Sequence
  Description of Artificial Sequence: Synthetic oligonucleotide
  Description of Combined DNA/RNA Molecule: Synthetic oligonucleotide
guuccgggaaggggccaautt

SEQ ID NO: 222 - DNA, 21 bp, Artificial Sequence
  Description of Artificial Sequence: Synthetic oligonucleotide
  Description of Combined DNA/RNA Molecule: Synthetic oligonucleotide
gggccaauacagaccaggatt

SEQ ID NO: 223 - DNA, 21 bp, Artificial Sequence
  Description of Artificial Sequence: Synthetic oligonucleotide
  Description of Combined DNA/RNA Molecule: Synthetic oligonucleotide
ccagaagaagugaugcgggtt

SEQ ID NO: 224 - DNA, 21 bp, Artificial Sequence
  Description of Artificial Sequence: Synthetic oligonucleotide
  Description of Combined DNA/RNA Molecule: Synthetic oligonucleotide
ucaccggcucucugugaautt

SEQ ID NO: 225 - DNA, 21 bp, Artificial Sequence
  Description of Artificial Sequence: Synthetic oligonucleotide
  Description of Combined DNA/RNA Molecule: Synthetic oligonucleotide
gaccacgaacaagaccguctt

SEQ ID NO: 226 - DNA, 21 bp, Artificial Sequence
  Description of Artificial Sequence: Synthetic oligonucleotide
  Description of Combined DNA/RNA Molecule: Synthetic oligonucleotide
gaacaagaccguccaucuctt

SEQ ID NO: 227 - DNA, 21 bp, Artificial Sequence
  Description of Artificial Sequence: Synthetic oligonucleotide
  Description of Combined DNA/RNA Molecule: Synthetic oligonucleotide
agaccguccaucucaacgutt

SEQ ID NO: 228 - DNA, 21 bp, Artificial Sequence
  Description of Artificial Sequence: Synthetic oligonucleotide
  Description of Combined DNA/RNA Molecule: Synthetic oligonucleotide
ccguccaucucaacguguctt

SEQ ID NO: 229 - DNA, 21 bp, Artificial Sequence
  Description of Artificial Sequence: Synthetic oligonucleotide
  Description of Combined DNA/RNA Molecule: Synthetic oligonucleotide
ggagacggcacaguauccatt

SEQ ID NO: 230 - DNA, 21 bp, Artificial Sequence
  Description of Artificial Sequence: Synthetic oligonucleotide
  Description of Combined DNA/RNA Molecule: Synthetic oligonucleotide
caguauccacagucuugggtt

SEQ ID NO: 231 - DNA, 21 bp, Artificial Sequence
  Description of Artificial Sequence: Synthetic oligonucleotide
  Description of Combined DNA/RNA Molecule: Synthetic oligonucleotide
guauccacagucuugggaatt

SEQ ID NO: 232 - DNA, 21 bp, Artificial Sequence
  Description of Artificial Sequence: Synthetic oligonucleotide
  Description of Combined DNA/RNA Molecule: Synthetic oligonucleotide
cucagcaggucuaccugaatt

SEQ ID NO: 233 - DNA, 21 bp, Artificial Sequence
  Description of Artificial Sequence: Synthetic oligonucleotide
  Description of Combined DNA/RNA Molecule: Synthetic oligonucleotide
gcgugggagauacgggcautt

SEQ ID NO: 234 - DNA, 21 bp, Artificial Sequence
  Description of Artificial Sequence: Synthetic oligonucleotide
  Description of Combined DNA/RNA Molecule: Synthetic oligonucleotide
ugggagauacgggcauagatt

SEQ ID NO: 235 - DNA, 21 bp, Artificial Sequence
  Description of Artificial Sequence: Synthetic oligonucleotide
  Description of Combined DNA/RNA Molecule: Synthetic oligonucleotide
ggagauacgggcauagaggtt

SEQ ID NO: 236 - DNA, 21 bp, Artificial Sequence
  Description of Artificial Sequence: Synthetic oligonucleotide
  Description of Combined DNA/RNA Molecule: Synthetic oligonucleotide
gauacgggcauagaggaugtt

SEQ ID NO: 237 - DNA, 21 bp, Artificial Sequence
  Description of Artificial Sequence: Synthetic oligonucleotide
  Description of Combined DNA/RNA Molecule: Synthetic oligonucleotide
acgggcauagaggaugcaatt

SEQ ID NO: 238 - DNA, 21 bp, Artificial Sequence
  Description of Artificial Sequence: Synthetic oligonucleotide
  Description of Combined DNA/RNA Molecule: Synthetic oligonucleotide
ggagcugucgggaagaucatt

SEQ ID NO: 239 - DNA, 21 bp, Artificial Sequence
  Description of Artificial Sequence: Synthetic oligonucleotide
  Description of Combined DNA/RNA Molecule: Synthetic oligonucleotide
gcgcgaccuuaucuccaactt

SEQ ID NO: 240 - DNA, 21 bp, Artificial Sequence
  Description of Artificial Sequence: Synthetic oligonucleotide
  Description of Combined DNA/RNA Molecule: Synthetic oligonucleotide
gcgaccuuaucuccaacaatt

SEQ ID NO: 241 - DNA, 21 bp, Artificial Sequence
  Description of Artificial Sequence: Synthetic oligonucleotide
  Description of Combined DNA/RNA Molecule: Synthetic oligonucleotide
cuggacaaacugacagucatt

SEQ ID NO: 242 - DNA, 21 bp, Artificial Sequence
  Description of Artificial Sequence: Synthetic oligonucleotide
  Description of Combined DNA/RNA Molecule: Synthetic oligonucleotide
ggaacuggaggacccgucutt

SEQ ID NO: 243 - DNA, 21 bp, Artificial Sequence
  Description of Artificial Sequence: Synthetic oligonucleotide
  Description of Combined DNA/RNA Molecule: Synthetic oligonucleotide
gcagaggcggucuucaacatt

SEQ ID NO: 244 - DNA, 21 bp, Artificial Sequence
  Description of Artificial Sequence: Synthetic oligonucleotide
  Description of Combined DNA/RNA Molecule: Synthetic oligonucleotide
uguaccucaucccaugagatt

SEQ ID NO: 245 - DNA, 21 bp, Artificial Sequence
  Description of Artificial Sequence: Synthetic oligonucleotide
  Description of Combined DNA/RNA Molecule: Synthetic oligonucleotide
gacaaaccaagucggaacatt

SEQ ID NO: 246 - DNA, 21 bp, Artificial Sequence
  Description of Artificial Sequence: Synthetic oligonucleotide
  Description of Combined DNA/RNA Molecule: Synthetic oligonucleotide
aaaccaagucggaacagcatt

SEQ ID NO: 247 - DNA, 21 bp, Artificial Sequence
  Description of Artificial Sequence: Synthetic oligonucleotide
  Description of Combined DNA/RNA Molecule: Synthetic oligonucleotide
agcuagacagauccccguutt

SEQ ID NO: 248 - DNA, 21 bp, Artificial Sequence
  Description of Artificial Sequence: Synthetic oligonucleotide
  Description of Combined DNA/RNA Molecule: Synthetic oligonucleotide
cuaggcucauggacgagautt

SEQ ID NO: 249 - DNA, 21 bp, Artificial Sequence
  Description of Artificial Sequence: Synthetic oligonucleotide
  Description of Combined DNA/RNA Molecule: Synthetic oligonucleotide
gagaagggauaacccuacatt

SEQ ID NO: 250 - DNA, 21 bp, Artificial Sequence
  Description of Artificial Sequence: Synthetic oligonucleotide
  Description of Combined DNA/RNA Molecule: Synthetic oligonucleotide
ccaauguuuuccacccauatt

SEQ ID NO: 251 - DNA, 21 bp, Artificial Sequence
  Description of Artificial Sequence: Synthetic oligonucleotide
  Description of Combined DNA/RNA Molecule: Synthetic oligonucleotide
guuuuccacccauaauccutt

SEQ ID NO: 252 - DNA, 21 bp, Artificial Sequence
  Description of Artificial Sequence: Synthetic oligonucleotide
  Description of Combined DNA/RNA Molecule: Synthetic oligonucleotide
ccauaauccuuucugccgatt

SEQ ID NO: 253 - DNA, 21 bp, Artificial Sequence
  Description of Artificial Sequence: Synthetic oligonucleotide
  Description of Combined DNA/RNA Molecule: Synthetic oligonucleotide
ccaagcuuguuaucagcuutt

SEQ ID NO: 254 - DNA, 21 bp, Artificial Sequence
  Description of Artificial Sequence: Synthetic oligonucleotide
  Description of Combined DNA/RNA Molecule: Synthetic oligonucleotide
ggccaugguucacauuagatt

SEQ ID NO: 255 - DNA, 21 bp, Artificial Sequence
  Description of Artificial Sequence: Synthetic oligonucleotide
  Description of Combined DNA/RNA Molecule: Synthetic oligonucleotide
ccggauaucuguguuaccatt

SEQ ID NO: 256 - DNA, 21 bp, Artificial Sequence
  Description of Artificial Sequence: Synthetic oligonucleotide
  Description of Combined DNA/RNA Molecule: Synthetic oligonucleotide
gcaugaguagcuugaaacutt

SEQ ID NO: 257 - DNA, 21 bp, Artificial Sequence
  Description of Artificial Sequence: Synthetic oligonucleotide
  Description of Combined DNA/RNA Molecule: Synthetic oligonucleotide
gcaugggcucuaucaaggatt

SEQ ID NO: 258 - DNA, 21 bp, Artificial Sequence
  Description of Artificial Sequence: Synthetic oligonucleotide
  Description of Combined DNA/RNA Molecule: Synthetic oligonucleotide
acuaauaucugagcaucuutt

SEQ ID NO: 259 - DNA, 21 bp, Artificial Sequence
  Description of Artificial Sequence: Synthetic oligonucleotide
  Description of Combined DNA/RNA Molecule: Synthetic oligonucleotide
ggauuuaauggcccaacautt

SEQ ID NO: 260 - DNA, 21 bp, Artificial Sequence
  Description of Artificial Sequence: Synthetic oligonucleotide
  Description of Combined DNA/RNA Molecule: Synthetic oligonucleotide
agggcaagaucucauuucatt

SEQ ID NO: 261 - DNA, 21 bp, Artificial Sequence
  Description of Artificial Sequence: Synthetic oligonucleotide
  Description of Combined DNA/RNA Molecule: Synthetic oligonucleotide
uuuauuagagggccuuauutt

SEQ ID NO: 262 - DNA, 21 bp, Artificial Sequence
  Description of Artificial Sequence: Synthetic oligonucleotide
  Description of Combined DNA/RNA Molecule: Synthetic oligonucleotide
auugauguguucuaagucutt

SEQ ID NO: 263 - DNA, 21 bp, Artificial Sequence
  Description of Artificial Sequence: Synthetic oligonucleotide
  Description of Combined DNA/RNA Molecule: Synthetic oligonucleotide
gggcagaugaagccgagaatt

SEQ ID NO: 264 - DNA, 21 bp, Artificial Sequence
  Description of Artificial Sequence: Synthetic oligonucleotide
  Description of Combined DNA/RNA Molecule: Synthetic oligonucleotide
ccaccgaauaugaguaccutt

SEQ ID NO: 265 - DNA, 21 bp, Artificial Sequence
  Description of Artificial Sequence: Synthetic oligonucleotide
  Description of Combined DNA/RNA Molecule: Synthetic oligonucleotide
ccgaauaugaguaccuagatt

SEQ ID NO: 266 - DNA, 21 bp, Artificial Sequence
  Description of Artificial Sequence: Synthetic oligonucleotide
  Description of Combined DNA/RNA Molecule: Synthetic oligonucleotide
gcacagaccacucaacccatt

SEQ ID NO: 267 - DNA, 21 bp, Artificial Sequence
  Description of Artificial Sequence: Synthetic oligonucleotide
  Description of Combined DNA/RNA Molecule: Synthetic oligonucleotide
accaaaagaggucuguucatt

SEQ ID NO: 268 - DNA, 21 bp, Artificial Sequence
  Description of Artificial Sequence: Synthetic oligonucleotide
  Description of Combined DNA/RNA Molecule: Synthetic oligonucleotide
aagcagacgggcaaguggatt

SEQ ID NO: 269 - DNA, 21 bp, Artificial Sequence
  Description of Artificial Sequence: Synthetic oligonucleotide
  Description of Combined DNA/RNA Molecule: Synthetic oligonucleotide
aguacugaagagugacggatt

SEQ ID NO: 270 - DNA, 21 bp, Artificial Sequence
  Description of Artificial Sequence: Synthetic oligonucleotide
  Description of Combined DNA/RNA Molecule: Synthetic oligonucleotide
acugaagagugacggacuutt

SEQ ID NO: 271 - DNA, 21 bp, Artificial Sequence
  Description of Artificial Sequence: Synthetic oligonucleotide
  Description of Combined DNA/RNA Molecule: Synthetic oligonucleotide
ccaagggcagaccuuucuutt

SEQ ID NO: 272 - DNA, 21 bp, Artificial Sequence
  Description of Artificial Sequence: Synthetic oligonucleotide
  Description of Combined DNA/RNA Molecule: Synthetic oligonucleotide
aaggcuacacccaagucuutt

SEQ ID NO: 273 - DNA, 21 bp, Artificial Sequence
  Description of Artificial Sequence: Synthetic oligonucleotide
  Description of Combined DNA/RNA Molecule: Synthetic oligonucleotide
cuuucuacgugacucuucutt

SEQ ID NO: 274 - DNA, 21 bp, Artificial Sequence
  Description of Artificial Sequence: Synthetic oligonucleotide
  Description of Combined DNA/RNA Molecule: Synthetic oligonucleotide
gcaaccaagucgugagagatt

SEQ ID NO: 275 - DNA, 21 bp, Artificial Sequence
  Description of Artificial Sequence: Synthetic oligonucleotide
  Description of Combined DNA/RNA Molecule: Synthetic oligonucleotide
cgugagagauaagauuacutt

SEQ ID NO: 276 - DNA, 21 bp, Artificial Sequence
  Description of Artificial Sequence: Synthetic oligonucleotide
  Description of Combined DNA/RNA Molecule: Synthetic oligonucleotide
aacaagagcaugucuacgatt

SEQ ID NO: 277 - DNA, 21 bp, Artificial Sequence
  Description of Artificial Sequence: Synthetic oligonucleotide
  Description of Combined DNA/RNA Molecule: Synthetic oligonucleotide
cacuaggacuuggucaucatt

SEQ ID NO: 278 - DNA, 21 bp, Artificial Sequence
  Description of Artificial Sequence: Synthetic oligonucleotide
  Description of Combined DNA/RNA Molecule: Synthetic oligonucleotide
acuaggacuuggucaucautt

SEQ ID NO: 279 - DNA, 21 bp, Artificial Sequence
  Description of Artificial Sequence: Synthetic oligonucleotide
  Description of Combined DNA/RNA Molecule: Synthetic oligonucleotide
gucaucaugccuacagacatt

SEQ ID NO: 280 - DNA, 21 bp, Artificial Sequence
  Description of Artificial Sequence: Synthetic oligonucleotide
  Description of Combined DNA/RNA Molecule: Synthetic oligonucleotide
ggccagacagcuuuuaauutt

SEQ ID NO: 281 - DNA, 21 bp, Artificial Sequence
  Description of Artificial Sequence: Synthetic oligonucleotide
  Description of Combined DNA/RNA Molecule: Synthetic oligonucleotide
gccagaggaacgccagcgatt

SEQ ID NO: 282 - DNA, 21 bp, Artificial Sequence
  Description of Artificial Sequence: Synthetic oligonucleotide
  Description of Combined DNA/RNA Molecule: Synthetic oligonucleotide
gccgucgcuuuuccagcautt

SEQ ID NO: 283 - DNA, 21 bp, Artificial Sequence
  Description of Artificial Sequence: Synthetic oligonucleotide
  Description of Combined DNA/RNA Molecule: Synthetic oligonucleotide
ggaacggccugcgagagcutt

SEQ ID NO: 284 - DNA, 21 bp, Artificial Sequence
  Description of Artificial Sequence: Synthetic oligonucleotide
  Description of Combined DNA/RNA Molecule: Synthetic oligonucleotide
ccgacuaugagaacauguutt

SEQ ID NO: 285 - DNA, 21 bp, Artificial Sequence
  Description of Artificial Sequence: Synthetic oligonucleotide
  Description of Combined DNA/RNA Molecule: Synthetic oligonucleotide
gccuaagauguccuaaccutt

SEQ ID NO: 286 - DNA, 21 bp, Artificial Sequence
  Description of Artificial Sequence: Synthetic oligonucleotide
  Description of Combined DNA/RNA Molecule: Synthetic oligonucleotide
caauaaaugcuucgaggcutt

SEQ ID NO: 287 - DNA, 21 bp, Artificial Sequence
  Description of Artificial Sequence: Synthetic oligonucleotide
  Description of Combined DNA/RNA Molecule: Synthetic oligonucleotide
cuucgaggcugaugaggcutt

SEQ ID NO: 288 - DNA, 21 bp, Artificial Sequence
  Description of Artificial Sequence: Synthetic oligonucleotide
  Description of Combined DNA/RNA Molecule: Synthetic oligonucleotide
cuuaauggaaauggcgauatt

SEQ ID NO: 289 - DNA, 21 bp, Artificial Sequence
  Description of Artificial Sequence: Synthetic oligonucleotide
  Description of Combined DNA/RNA Molecule: Synthetic oligonucleotide
uaauggaaauggcgauauutt

SEQ ID NO: 290 - DNA, 21 bp, Artificial Sequence
  Description of Artificial Sequence: Synthetic oligonucleotide
  Description of Combined DNA/RNA Molecule: Synthetic oligonucleotide
uaucaugucccugaaacgatt

SEQ ID NO: 291 - DNA, 21 bp, Artificial Sequence
  Description of Artificial Sequence: Synthetic oligonucleotide
  Description of Combined DNA/RNA Molecule: Synthetic oligonucleotide
gaaacgaaugcuggagaaatt

SEQ ID NO: 292 - DNA, 21 bp, Artificial Sequence
  Description of Artificial Sequence: Synthetic oligonucleotide
  Description of Combined DNA/RNA Molecule: Synthetic oligonucleotide
agacucaccuagagcuaaatt

SEQ ID NO: 293 - DNA, 21 bp, Artificial Sequence
  Description of Artificial Sequence: Synthetic oligonucleotide
  Description of Combined DNA/RNA Molecule: Synthetic oligonucleotide
cucaccuagagcuaaagaatt

SEQ ID NO: 294 - DNA, 21 bp, Artificial Sequence
  Description of Artificial Sequence: Synthetic oligonucleotide
  Description of Combined DNA/RNA Molecule: Synthetic oligonucleotide
ucaccuagagcuaaagaaatt

SEQ ID NO: 295 - DNA, 21 bp, Artificial Sequence
  Description of Artificial Sequence: Synthetic oligonucleotide
  Description of Combined DNA/RNA Molecule: Synthetic oligonucleotide
accuagagcuaaagaaauutt

SEQ ID NO: 296 - DNA, 21 bp, Artificial Sequence
  Description of Artificial Sequence: Synthetic oligonucleotide
  Description of Combined DNA/RNA Molecule: Synthetic oligonucleotide
ccuagagcuaaagaaauuatt

SEQ ID NO: 297 - DNA, 21 bp, Artificial Sequence
  Description of Artificial Sequence: Synthetic oligonucleotide
  Description of Combined DNA/RNA Molecule: Synthetic oligonucleotide
ccggggagacguucagcuatt

SEQ ID NO: 298 - DNA, 21 bp, Artificial Sequence
  Description of Artificial Sequence: Synthetic oligonucleotide
  Description of Combined DNA/RNA Molecule: Synthetic oligonucleotide
accaaaaauuacacagagutt

SEQ ID NO: 299 - DNA, 21 bp, Artificial Sequence
  Description of Artificial Sequence: Synthetic oligonucleotide
  Description of Combined DNA/RNA Molecule: Synthetic oligonucleotide
gaggguaauguccuucaaatt

SEQ ID NO: 300 - DNA, 21 bp, Artificial Sequence
  Description of Artificial Sequence: Synthetic oligonucleotide
  Description of Combined DNA/RNA Molecule: Synthetic oligonucleotide
gguaauguccuucaaaucutt

SEQ ID NO: 301 - DNA, 21 bp, Artificial Sequence
  Description of Artificial Sequence: Synthetic oligonucleotide
  Description of Combined DNA/RNA Molecule: Synthetic oligonucleotide
ucauaugaucauuuaaggatt

SEQ ID NO: 302 - DNA, 21 bp, Artificial Sequence
  Description of Artificial Sequence: Synthetic oligonucleotide
  Description of Combined DNA/RNA Molecule: Synthetic oligonucleotide
gaacacaguuuauuccgaatt

SEQ ID NO: 303 - DNA, 21 bp, Artificial Sequence
  Description of Artificial Sequence: Synthetic oligonucleotide
  Description of Combined DNA/RNA Molecule: Synthetic oligonucleotide
ggaacuggguauaauccaatt

SEQ ID NO: 304 - DNA, 21 bp, Artificial Sequence
  Description of Artificial Sequence: Synthetic oligonucleotide
  Description of Combined DNA/RNA Molecule: Synthetic oligonucleotide
gcaccaacuaccauuagcatt

SEQ ID NO: 305 - DNA, 21 bp, Artificial Sequence
  Description of Artificial Sequence: Synthetic oligonucleotide
  Description of Combined DNA/RNA Molecule: Synthetic oligonucleotide
cacuacaguuaacgcugaatt

SEQ ID NO: 306 - DNA, 21 bp, Artificial Sequence
  Description of Artificial Sequence: Synthetic oligonucleotide
  Description of Combined DNA/RNA Molecule: Synthetic oligonucleotide
gguaucaggaaucaaaauutt

SEQ ID NO: 307 - DNA, 21 bp, Artificial Sequence
  Description of Artificial Sequence: Synthetic oligonucleotide
  Description of Combined DNA/RNA Molecule: Synthetic oligonucleotide
ccuuacagcauaacuaauutt

SEQ ID NO: 308 - DNA, 21 bp, Artificial Sequence
  Description of Artificial Sequence: Synthetic oligonucleotide
  Description of Combined DNA/RNA Molecule: Synthetic oligonucleotide
gaggccgucaccauaaagutt

SEQ ID NO: 309 - DNA, 21 bp, Artificial Sequence
  Description of Artificial Sequence: Synthetic oligonucleotide
  Description of Combined DNA/RNA Molecule: Synthetic oligonucleotide
gaagcgagagcuaaacagatt

SEQ ID NO: 310 - DNA, 21 bp, Artificial Sequence
  Description of Artificial Sequence: Synthetic oligonucleotide
  Description of Combined DNA/RNA Molecule: Synthetic oligonucleotide
gugcucggcguauuuuucatt

SEQ ID NO: 311 - DNA, 21 bp, Artificial Sequence
  Description of Artificial Sequence: Synthetic oligonucleotide
  Description of Combined DNA/RNA Molecule: Synthetic oligonucleotide
agaacuauaccauaagagatt

SEQ ID NO: 312 - DNA, 21 bp, Artificial Sequence
  Description of Artificial Sequence: Synthetic oligonucleotide
  Description of Combined DNA/RNA Molecule: Synthetic oligonucleotide
ccauaagagacauguggaatt

SEQ ID NO: 313 - DNA, 21 bp, Artificial Sequence
  Description of Artificial Sequence: Synthetic oligonucleotide
  Description of Combined DNA/RNA Molecule: Synthetic oligonucleotide
ggccauagaaacguuuuaatt

SEQ ID NO: 314 - DNA, 21 bp, Artificial Sequence
  Description of Artificial Sequence: Synthetic oligonucleotide
  Description of Combined DNA/RNA Molecule: Synthetic oligonucleotide
ccauagaaacguuuuaauutt

SEQ ID NO: 315 - DNA, 21 bp, Artificial Sequence
  Description of Artificial Sequence: Synthetic oligonucleotide
  Description of Combined DNA/RNA Molecule: Synthetic oligonucleotide
acauauaucaucaggucuutt

SEQ ID NO: 316 - DNA, 21 bp, Artificial Sequence
  Description of Artificial Sequence: Synthetic oligonucleotide
  Description of Combined DNA/RNA Molecule: Synthetic oligonucleotide
cgacgcacgccucuucuuutt

SEQ ID NO: 317 - DNA, 21 bp, Artificial Sequence
  Description of Artificial Sequence: Synthetic oligonucleotide
  Description of Combined DNA/RNA Molecule: Synthetic oligonucleotide
ggcugcgcuucaaguacuatt

SEQ ID NO: 318 - DNA, 21 bp, Artificial Sequence
  Description of Artificial Sequence: Synthetic oligonucleotide
  Description of Combined DNA/RNA Molecule: Synthetic oligonucleotide
guucccgauguuaacgucutt

SEQ ID NO: 319 - DNA, 21 bp, Artificial Sequence
  Description of Artificial Sequence: Synthetic oligonucleotide
  Description of Combined DNA/RNA Molecule: Synthetic oligonucleotide
ccagcugccgaauuguacatt

SEQ ID NO: 320 - DNA, 21 bp, Artificial Sequence
  Description of Artificial Sequence: Synthetic oligonucleotide
  Description of Combined DNA/RNA Molecule: Synthetic oligonucleotide
gcugccgaauuguacacgatt

SEQ ID NO: 321 - DNA, 21 bp, Artificial Sequence
  Description of Artificial Sequence: Synthetic oligonucleotide
  Description of Combined DNA/RNA Molecule: Synthetic oligonucleotide
guagcuacaggaugaugaatt

SEQ ID NO: 322 - DNA, 21 bp, Artificial Sequence
  Description of Artificial Sequence: Synthetic oligonucleotide
  Description of Combined DNA/RNA Molecule: Synthetic oligonucleotide
cucuggaauugcuacugcutt

SEQ ID NO: 323 - DNA, 21 bp, Artificial Sequence
  Description of Artificial Sequence: Synthetic oligonucleotide
  Description of Combined DNA/RNA Molecule: Synthetic oligonucleotide
cuaaccugguuuuauacuutt

SEQ ID NO: 324 - DNA, 21 bp, Artificial Sequence
  Description of Artificial Sequence: Synthetic oligonucleotide
  Description of Combined DNA/RNA Molecule: Synthetic oligonucleotide
cuuucgaccagaagauugutt

SEQ ID NO: 325 - DNA, 21 bp, Artificial Sequence
  Description of Artificial Sequence: Synthetic oligonucleotide
  Description of Combined DNA/RNA Molecule: Synthetic oligonucleotide
uccagaaaaucuaaguacutt

SEQ ID NO: 326 - DNA, 21 bp, Artificial Sequence
  Description of Artificial Sequence: Synthetic oligonucleotide
  Description of Combined DNA/RNA Molecule: Synthetic oligonucleotide
gaauccaaauuuaaaggcatt

SEQ ID NO: 327 - DNA, 21 bp, Artificial Sequence
  Description of Artificial Sequence: Synthetic oligonucleotide
  Description of Combined DNA/RNA Molecule: Synthetic oligonucleotide
cccaagccugucaucaaaatt

SEQ ID NO: 328 - DNA, 21 bp, Artificial Sequence
  Description of Artificial Sequence: Synthetic oligonucleotide
  Description of Combined DNA/RNA Molecule: Synthetic oligonucleotide
acaacuguuaucugaaacutt

SEQ ID NO: 329 - DNA, 21 bp, Artificial Sequence
  Description of Artificial Sequence: Synthetic oligonucleotide
  Description of Combined DNA/RNA Molecule: Synthetic oligonucleotide
ccuggcgagucuguaaacutt

SEQ ID NO: 330 - DNA, 21 bp, Artificial Sequence
  Description of Artificial Sequence: Synthetic oligonucleotide
  Description of Combined DNA/RNA Molecule: Synthetic oligonucleotide
cuggcgagucuguaaacuatt

SEQ ID NO: 331 - DNA, 21 bp, Artificial Sequence
  Description of Artificial Sequence: Synthetic oligonucleotide
  Description of Combined DNA/RNA Molecule: Synthetic oligonucleotide
uguuauacuugccaagucatt

SEQ ID NO: 332 - DNA, 21 bp, Artificial Sequence
  Description of Artificial Sequence: Synthetic oligonucleotide
  Description of Combined DNA/RNA Molecule: Synthetic oligonucleotide
ccggccacuccaaaaaccutt

SEQ ID NO: 333 - DNA, 21 bp, Artificial Sequence
  Description of Artificial Sequence: Synthetic oligonucleotide
  Description of Combined DNA/RNA Molecule: Synthetic oligonucleotide
ggccccaggacuacucacutt

SEQ ID NO: 334 - DNA, 21 bp, Artificial Sequence
  Description of Artificial Sequence: Synthetic oligonucleotide
  Description of Combined DNA/RNA Molecule: Synthetic oligonucleotide
acuccucggugcucauaautt

SEQ ID NO: 335 - DNA, 21 bp, Artificial Sequence
  Description of Artificial Sequence: Synthetic oligonucleotide
  Description of Combined DNA/RNA Molecule: Synthetic oligonucleotide
caacgucaccuauguuccatt

SEQ ID NO: 336 - DNA, 21 bp, Artificial Sequence
  Description of Artificial Sequence: Synthetic oligonucleotide
  Description of Combined DNA/RNA Molecule: Synthetic oligonucleotide
ucaccuauguuccacagaatt

SEQ ID NO: 337 - DNA, 21 bp, Artificial Sequence
  Description of Artificial Sequence: Synthetic oligonucleotide
  Description of Combined DNA/RNA Molecule: Synthetic oligonucleotide
cccaacaacugguaucuuutt

SEQ ID NO: 338 - DNA, 21 bp, Artificial Sequence
  Description of Artificial Sequence: Synthetic oligonucleotide
  Description of Combined DNA/RNA Molecule: Synthetic oligonucleotide
ccagagcaggagugguucatt

SEQ ID NO: 339 - DNA, 21 bp, Artificial Sequence
  Description of Artificial Sequence: Synthetic oligonucleotide
  Description of Combined DNA/RNA Molecule: Synthetic oligonucleotide
gguucauggggccauuggatt

SEQ ID NO: 340 - DNA, 21 bp, Artificial Sequence
  Description of Artificial Sequence: Synthetic oligonucleotide
  Description of Combined DNA/RNA Molecule: Synthetic oligonucleotide
cugaucauuucgccuaaaatt

SEQ ID NO: 341 - DNA, 21 bp, Artificial Sequence
  Description of Artificial Sequence: Synthetic oligonucleotide
  Description of Combined DNA/RNA Molecule: Synthetic oligonucleotide
cauuucgccuaaaagagcatt

SEQ ID NO: 342 - DNA, 21 bp, Artificial Sequence
  Description of Artificial Sequence: Synthetic oligonucleotide
  Description of Combined DNA/RNA Molecule: Synthetic oligonucleotide
gccuaaaagagcaaggacutt

SEQ ID NO: 343 - DNA, 21 bp, Artificial Sequence
  Description of Artificial Sequence: Synthetic oligonucleotide
  Description of Combined DNA/RNA Molecule: Synthetic oligonucleotide
ggaacuccacuaugcaucutt

SEQ ID NO: 344 - DNA, 21 bp, Artificial Sequence
  Description of Artificial Sequence: Synthetic oligonucleotide
  Description of Combined DNA/RNA Molecule: Synthetic oligonucleotide
caaggaggauccaagagcutt

SEQ ID NO: 345 - DNA, 21 bp, Artificial Sequence
  Description of Artificial Sequence: Synthetic oligonucleotide
  Description of Combined DNA/RNA Molecule: Synthetic oligonucleotide
ggauccaagagcugacuautt

SEQ ID NO: 346 - DNA, 21 bp, Artificial Sequence
  Description of Artificial Sequence: Synthetic oligonucleotide
  Description of Combined DNA/RNA Molecule: Synthetic oligonucleotide
ucucgagccuccguucaaatt

SEQ ID NO: 347 - DNA, 21 bp, Artificial Sequence
  Description of Artificial Sequence: Synthetic oligonucleotide
  Description of Combined DNA/RNA Molecule: Synthetic oligonucleotide
cuccguucaaauugaucautt

SEQ ID NO: 348 - DNA, 21 bp, Artificial Sequence
  Description of Artificial Sequence: Synthetic oligonucleotide
  Description of Combined DNA/RNA Molecule: Synthetic oligonucleotide
ugaucaucaucaaaacuuatt

SEQ ID NO: 349 - DNA, 21 bp, Artificial Sequence
  Description of Artificial Sequence: Synthetic oligonucleotide
  Description of Combined DNA/RNA Molecule: Synthetic oligonucleotide
accuuugaauagggaauuutt

SEQ ID NO: 350 - DNA, 21 bp, Artificial Sequence
  Description of Artificial Sequence: Synthetic oligonucleotide
  Description of Combined DNA/RNA Molecule: Synthetic oligonucleotide
ggaccaggccgugaucucutt

SEQ ID NO: 351 - DNA, 21 bp, Artificial Sequence
  Description of Artificial Sequence: Synthetic oligonucleotide
  Description of Combined DNA/RNA Molecule: Synthetic oligonucleotide
ggucagguggagaucucuutt

SEQ ID NO: 352 - DNA, 21 bp, Artificial Sequence
  Description of Artificial Sequence: Synthetic oligonucleotide
  Description of Combined DNA/RNA Molecule: Synthetic oligonucleotide
uuuaauguaucgcuaccaatt

SEQ ID NO: 353 - DNA, 21 bp, Artificial Sequence
  Description of Artificial Sequence: Synthetic oligonucleotide
  Description of Combined DNA/RNA Molecule: Synthetic oligonucleotide
aaaucgacaccugaaaaagtt

SEQ ID NO: 354 - DNA, 21 bp, Artificial Sequence
  Description of Artificial Sequence: Synthetic oligonucleotide
  Description of Combined DNA/RNA Molecule: Synthetic oligonucleotide
cguugcgcuggaaggaauutt

SEQ ID NO: 355 - DNA, 21 bp, Artificial Sequence
  Description of Artificial Sequence: Synthetic oligonucleotide
  Description of Combined DNA/RNA Molecule: Synthetic oligonucleotide
cugcgcgaggcgcaauacatt

SEQ ID NO: 356 - DNA, 21 bp, Artificial Sequence
  Description of Artificial Sequence: Synthetic oligonucleotide
  Description of Combined DNA/RNA Molecule: Synthetic oligonucleotide
cccucgauguacauagcuutt

SEQ ID NO: 357 - DNA, 21 bp, Artificial Sequence
  Description of Artificial Sequence: Synthetic oligonucleotide
  Description of Combined DNA/RNA Molecule: Synthetic oligonucleotide
cacagugcauaagcaguuutt

SEQ ID NO: 358 - DNA, 21 bp, Artificial Sequence
  Description of Artificial Sequence: Synthetic oligonucleotide
  Description of Combined DNA/RNA Molecule: Synthetic oligonucleotide
aaaucaaucauguuacacutt

SEQ ID NO: 359 - DNA, 21 bp, Artificial Sequence
  Description of Artificial Sequence: Synthetic oligonucleotide
  Description of Combined DNA/RNA Molecule: Synthetic oligonucleotide
gcacauagcaagcugaacutt

SEQ ID NO: 360 - DNA, 21 bp, Artificial Sequence
  Description of Artificial Sequence: Synthetic oligonucleotide
  Description of Combined DNA/RNA Molecule: Synthetic oligonucleotide
gcuugcgggacgucguagatt

SEQ ID NO: 361 - DNA, 21 bp, Artificial Sequence
  Description of Artificial Sequence: Synthetic oligonucleotide
  Description of Combined DNA/RNA Molecule: Synthetic oligonucleotide
gacgucguagagaaaaccatt

SEQ ID NO: 362 - DNA, 21 bp, Artificial Sequence
  Description of Artificial Sequence: Synthetic oligonucleotide
  Description of Combined DNA/RNA Molecule: Synthetic oligonucleotide
cgaccaacgacuccacaautt

SEQ ID NO: 363 - DNA, 21 bp, Artificial Sequence
  Description of Artificial Sequence: Synthetic oligonucleotide
  Description of Combined DNA/RNA Molecule: Synthetic oligonucleotide
ccaacgacuccacaauccutt

SEQ ID NO: 364 - DNA, 21 bp, Artificial Sequence
  Description of Artificial Sequence: Synthetic oligonucleotide
  Description of Combined DNA/RNA Molecule: Synthetic oligonucleotide
ccacaauccuagauaaggutt

SEQ ID NO: 365 - DNA, 21 bp, Artificial Sequence
  Description of Artificial Sequence: Synthetic oligonucleotide
  Description of Combined DNA/RNA Molecule: Synthetic oligonucleotide
ggcugcacaacaaccuuautt

SEQ ID NO: 366 - DNA, 21 bp, Artificial Sequence
  Description of Artificial Sequence: Synthetic oligonucleotide
  Description of Combined DNA/RNA Molecule: Synthetic oligonucleotide
guucaugacgcucucgauatt

SEQ ID NO: 367 - DNA, 21 bp, Artificial Sequence
  Description of Artificial Sequence: Synthetic oligonucleotide
  Description of Combined DNA/RNA Molecule: Synthetic oligonucleotide
cggcucgcucgauaccguutt

SEQ ID NO: 368 - DNA, 21 bp, Artificial Sequence
  Description of Artificial Sequence: Synthetic oligonucleotide
  Description of Combined DNA/RNA Molecule: Synthetic oligonucleotide
accacccacaagauuauuutt

SEQ ID NO: 369 - DNA, 21 bp, Artificial Sequence
  Description of Artificial Sequence: Synthetic oligonucleotide
  Description of Combined DNA/RNA Molecule: Synthetic oligonucleotide
ggaucuauaccaacgccaatt

SEQ ID NO: 370 - DNA, 21 bp, Artificial Sequence
  Description of Artificial Sequence: Synthetic oligonucleotide
  Description of Combined DNA/RNA Molecule: Synthetic oligonucleotide
cgccaaacgcacgaguauutt

SEQ ID NO: 371 - DNA, 21 bp, Artificial Sequence
  Description of Artificial Sequence: Synthetic oligonucleotide
  Description of Combined DNA/RNA Molecule: Synthetic oligonucleotide
gcuucgccgagaacaacuutt

SEQ ID NO: 372 - DNA, 21 bp, Artificial Sequence
  Description of Artificial Sequence: Synthetic oligonucleotide
  Description of Combined DNA/RNA Molecule: Synthetic oligonucleotide
gcgacaugaaggacagcautt

SEQ ID NO: 373 - DNA, 21 bp, Artificial Sequence
  Description of Artificial Sequence: Synthetic oligonucleotide
  Description of Combined DNA/RNA Molecule: Synthetic oligonucleotide
cccgcuggccauagcauuatt

SEQ ID NO: 374 - DNA, 21 bp, Artificial Sequence
  Description of Artificial Sequence: Synthetic oligonucleotide
  Description of Combined DNA/RNA Molecule: Synthetic oligonucleotide
gucucaaguccguauguaatt

SEQ ID NO: 375 - DNA, 21 bp, Artificial Sequence
  Description of Artificial Sequence: Synthetic oligonucleotide
  Description of Combined DNA/RNA Molecule: Synthetic oligonucleotide
ucucaaguccguauguaaatt

SEQ ID NO: 376 - DNA, 21 bp, Artificial Sequence
  Description of Artificial Sequence: Synthetic oligonucleotide
  Description of Combined DNA/RNA Molecule: Synthetic oligonucleotide
ccguauguaaaucagaucutt

SEQ ID NO: 377 - DNA, 21 bp, Artificial Sequence
  Description of Artificial Sequence: Synthetic oligonucleotide
  Description of Combined DNA/RNA Molecule: Synthetic oligonucleotide
acaaguaaaguuauucucatt

SEQ ID NO: 378 - DNA, 21 bp, Artificial Sequence
  Description of Artificial Sequence: Synthetic oligonucleotide
  Description of Combined DNA/RNA Molecule: Synthetic oligonucleotide
aaaguuauucucaauccautt

SEQ ID NO: 379 - DNA, 21 bp, Artificial Sequence
  Description of Artificial Sequence: Synthetic oligonucleotide
  Description of Combined DNA/RNA Molecule: Synthetic oligonucleotide
gugagcacucaggaugacutt

SEQ ID NO: 380 - DNA, 21 bp, Artificial Sequence
  Description of Artificial Sequence: Synthetic oligonucleotide
  Description of Combined DNA/RNA Molecule: Synthetic oligonucleotide
gaaaacacccacaguccgutt

SEQ ID NO: 381 - DNA, 21 bp, Artificial Sequence
  Description of Artificial Sequence: Synthetic oligonucleotide
  Description of Combined DNA/RNA Molecule: Synthetic oligonucleotide
caguccgugcugcauuaautt

SEQ ID NO: 382 - DNA, 21 bp, Artificial Sequence
  Description of Artificial Sequence: Synthetic oligonucleotide
  Description of Combined DNA/RNA Molecule: Synthetic oligonucleotide
guccgugcugcauuaaucutt

SEQ ID NO: 383 - DNA, 21 bp, Artificial Sequence
  Description of Artificial Sequence: Synthetic oligonucleotide
  Description of Combined DNA/RNA Molecule: Synthetic oligonucleotide
ugcugaaaggucguguggatt

SEQ ID NO: 384 - DNA, 21 bp, Artificial Sequence
  Description of Artificial Sequence: Synthetic oligonucleotide
  Description of Combined DNA/RNA Molecule: Synthetic oligonucleotide
gcguucagauccagauggutt

SEQ ID NO: 385 - DNA, 21 bp, Artificial Sequence
  Description of Artificial Sequence: Synthetic oligonucleotide
  Description of Combined DNA/RNA Molecule: Synthetic oligonucleotide
aaauacaaagauccgggcatt

SEQ ID NO: 386 - DNA, 21 bp, Artificial Sequence
  Description of Artificial Sequence: Synthetic oligonucleotide
  Description of Combined DNA/RNA Molecule: Synthetic oligonucleotide
auaugagcaaguugcucaatt

SEQ ID NO: 387 - DNA, 21 bp, Artificial Sequence
  Description of Artificial Sequence: Synthetic oligonucleotide
  Description of Combined DNA/RNA Molecule: Synthetic oligonucleotide
uauucuacaggugguuucutt

SEQ ID NO: 388 - DNA, 21 bp, Artificial Sequence
  Description of Artificial Sequence: Synthetic oligonucleotide
  Description of Combined DNA/RNA Molecule: Synthetic oligonucleotide
uauagugccgagcaguucutt

SEQ ID NO: 389 - RNA, 19 nt, Artificial Sequence
  Description of Artificial Sequence: Synthetic oligonucleotide
cagcaucuuggauuacaca

SEQ ID NO: 390 - RNA, 19 nt, Artificial Sequence
  Description of Artificial Sequence: Synthetic oligonucleotide
ggauacgaccagagcuuga

SEQ ID NO: 391 - RNA, 19 nt, Artificial Sequence
  Description of Artificial Sequence: Synthetic oligonucleotide
gcgauauggcugucaguaa

SEQ ID NO: 392 - RNA, 19 nt, Artificial Sequence
  Description of Artificial Sequence: Synthetic oligonucleotide
cuaugguuaugacuugaaa

SEQ ID NO: 393 - RNA, 19 nt, Artificial Sequence
  Description of Artificial Sequence: Synthetic oligonucleotide
gguuaugacuugaacucua

SEQ ID NO: 394 - RNA, 19 nt, Artificial Sequence
  Description of Artificial Sequence: Synthetic oligonucleotide
ggcacacccuucaucucaa

SEQ ID NO: 395 - RNA, 19 nt, Artificial Sequence
  Description of Artificial Sequence: Synthetic oligonucleotide
cccacuccgucuaagauca

SEQ ID NO: 396 - RNA, 19 nt, Artificial Sequence
  Description of Artificial Sequence: Synthetic oligonucleotide
ccacuccgucuaagaucaa

SEQ ID NO: 397 - RNA, 19 nt, Artificial Sequence
  Description of Artificial Sequence: Synthetic oligonucleotide
cacuccgucuaagaucaaa

SEQ ID NO: 398 - DNA, 21 bp, Artificial Sequence
  Description of Artificial Sequence: Synthetic oligonucleotide
  Description of Combined DNA/RNA Molecule: Synthetic oligonucleotide
gagacaauuacaacagagatt

SEQ ID NO: 399 - DNA, 21 bp, Artificial Sequence
  Description of Artificial Sequence: Synthetic oligonucleotide
  Description of Combined DNA/RNA Molecule: Synthetic oligonucleotide
cuuugggucaaccaacacatt

SEQ ID NO: 400 - DNA, 21 bp, Artificial Sequence
  Description of Artificial Sequence: Synthetic oligonucleotide
  Description of Combined DNA/RNA Molecule: Synthetic oligonucleotide
caaccaacaccaauagccatt

SEQ ID NO: 401 - DNA, 21 bp, Artificial Sequence
  Description of Artificial Sequence: Synthetic oligonucleotide
  Description of Combined DNA/RNA Molecule: Synthetic oligonucleotide
ccaucugcccguacuucuatt

SEQ ID NO: 402 - DNA, 21 bp, Artificial Sequence
  Description of Artificial Sequence: Synthetic oligonucleotide
  Description of Combined DNA/RNA Molecule: Synthetic oligonucleotide
ccaccaaagucauuugucutt

SEQ ID NO: 403 - DNA, 21 bp, Artificial Sequence
  Description of Artificial Sequence: Synthetic oligonucleotide
  Description of Combined DNA/RNA Molecule: Synthetic oligonucleotide
gucaaaaauucaccuaggatt

SEQ ID NO: 404 - DNA, 21 bp, Artificial Sequence
  Description of Artificial Sequence: Synthetic oligonucleotide
  Description of Combined DNA/RNA Molecule: Synthetic oligonucleotide
ggauuuaucuuagauacuatt

SEQ ID NO: 405 - DNA, 21 bp, Artificial Sequence
  Description of Artificial Sequence: Synthetic oligonucleotide
  Description of Combined DNA/RNA Molecule: Synthetic oligonucleotide
cauacuaauugguguacuutt

SEQ ID NO: 406 - DNA, 21 bp, Artificial Sequence
  Description of Artificial Sequence: Synthetic oligonucleotide
  Description of Combined DNA/RNA Molecule: Synthetic oligonucleotide
agcuauaaucaucauuguatt

SEQ ID NO: 407 - DNA, 21 bp, Artificial Sequence
  Description of Artificial Sequence: Synthetic oligonucleotide
  Description of Combined DNA/RNA Molecule: Synthetic oligonucleotide
cucccaacucugaucaagatt

SEQ ID NO: 408 - DNA, 21 bp, Artificial Sequence
  Description of Artificial Sequence: Synthetic oligonucleotide
  Description of Combined DNA/RNA Molecule: Synthetic oligonucleotide
ggauauacucaauuacacutt

SEQ ID NO: 409 - DNA, 21 bp, Artificial Sequence
  Description of Artificial Sequence: Synthetic oligonucleotide
  Description of Combined DNA/RNA Molecule: Synthetic oligonucleotide
ggucaagauaaaugcagaatt

SEQ ID NO: 410 - DNA, 21 bp, Artificial Sequence
  Description of Artificial Sequence: Synthetic oligonucleotide
  Description of Combined DNA/RNA Molecule: Synthetic oligonucleotide
agguaggcuaguauuauuutt

SEQ ID NO: 411 - DNA, 21 bp, Artificial Sequence
  Description of Artificial Sequence: Synthetic oligonucleotide
  Description of Combined DNA/RNA Molecule: Synthetic oligonucleotide
ccccaagcuugaauuuucatt

SEQ ID NO: 412 - DNA, 21 bp, Artificial Sequence
  Description of Artificial Sequence: Synthetic oligonucleotide
  Description of Combined DNA/RNA Molecule: Synthetic oligonucleotide
ggguaagccauaagcgaautt

SEQ ID NO: 413 - DNA, 21 bp, Artificial Sequence
  Description of Artificial Sequence: Synthetic oligonucleotide
  Description of Combined DNA/RNA Molecule: Synthetic oligonucleotide
ccauaagcgaaucuuaauutt

SEQ ID NO: 414 - DNA, 21 bp, Artificial Sequence
  Description of Artificial Sequence: Synthetic oligonucleotide
  Description of Combined DNA/RNA Molecule: Synthetic oligonucleotide
ugccauaucucuaauagaatt

SEQ ID NO: 415 - DNA, 21 bp, Artificial Sequence
  Description of Artificial Sequence: Synthetic oligonucleotide
  Description of Combined DNA/RNA Molecule: Synthetic oligonucleotide
gccuagaaucuuguauaautt

SEQ ID NO: 416 - DNA, 21 bp, Artificial Sequence
  Description of Artificial Sequence: Synthetic oligonucleotide
  Description of Combined DNA/RNA Molecule: Synthetic oligonucleotide
ccuagaaucuuguauaauatt

SEQ ID NO: 417 - DNA, 21 bp, Artificial Sequence
  Description of Artificial Sequence: Synthetic oligonucleotide
  Description of Combined DNA/RNA Molecule: Synthetic oligonucleotide
gcucucauaggaaaguuuutt

SEQ ID NO: 418 - DNA, 21 bp, Artificial Sequence
  Description of Artificial Sequence: Synthetic oligonucleotide
  Description of Combined DNA/RNA Molecule: Synthetic oligonucleotide
cugucagaaggguaucucatt

SEQ ID NO: 419 - DNA, 21 bp, Artificial Sequence
  Description of Artificial Sequence: Synthetic oligonucleotide
  Description of Combined DNA/RNA Molecule: Synthetic oligonucleotide
cuacgugagcugcaaaucatt

SEQ ID NO: 420 - DNA, 21 bp, Artificial Sequence
  Description of Artificial Sequence: Synthetic oligonucleotide
  Description of Combined DNA/RNA Molecule: Synthetic oligonucleotide
ggugauggccauuaauucatt

SEQ ID NO: 421 - DNA, 21 bp, Artificial Sequence
  Description of Artificial Sequence: Synthetic oligonucleotide
  Description of Combined DNA/RNA Molecule: Synthetic oligonucleotide
cauuauggacaccguguuutt

SEQ ID NO: 422 - DNA, 21 bp, Artificial Sequence
  Description of Artificial Sequence: Synthetic oligonucleotide
  Description of Combined DNA/RNA Molecule: Synthetic oligonucleotide
gucugaacucaucaugacatt

SEQ ID NO: 423 - DNA, 21 bp, Artificial Sequence
  Description of Artificial Sequence: Synthetic oligonucleotide
  Description of Combined DNA/RNA Molecule: Synthetic oligonucleotide
gcaauugaugucaacugaatt

SEQ ID NO: 424 - DNA, 21 bp, Artificial Sequence
  Description of Artificial Sequence: Synthetic oligonucleotide
  Description of Combined DNA/RNA Molecule: Synthetic oligonucleotide
caauguaaauccauagagatt

SEQ ID NO: 425 - DNA, 21 bp, Artificial Sequence
  Description of Artificial Sequence: Synthetic oligonucleotide
  Description of Combined DNA/RNA Molecule: Synthetic oligonucleotide
guaagaggagccauaaggatt

SEQ ID NO: 426 - DNA, 21 bp, Artificial Sequence
  Description of Artificial Sequence: Synthetic oligonucleotide
  Description of Combined DNA/RNA Molecule: Synthetic oligonucleotide
gccgacagcguucuguuuutt

SEQ ID NO: 427 - DNA, 21 bp, Artificial Sequence
  Description of Artificial Sequence: Synthetic oligonucleotide
  Description of Combined DNA/RNA Molecule: Synthetic oligonucleotide
cugcaagcguuucuucgaatt

SEQ ID NO: 428 - DNA, 21 bp, Artificial Sequence
  Description of Artificial Sequence: Synthetic oligonucleotide
  Description of Combined DNA/RNA Molecule: Synthetic oligonucleotide
gcccggauuuugcccaauatt

SEQ ID NO: 429 - DNA, 21 bp, Artificial Sequence
  Description of Artificial Sequence: Synthetic oligonucleotide
  Description of Combined DNA/RNA Molecule: Synthetic oligonucleotide
ggauuuugcccaauaagaatt

SEQ ID NO: 430 - DNA, 21 bp, Artificial Sequence
  Description of Artificial Sequence: Synthetic oligonucleotide
  Description of Combined DNA/RNA Molecule: Synthetic oligonucleotide
caauaagaaccgagacgaatt

SEQ ID NO: 431 - DNA, 21 bp, Artificial Sequence
  Description of Artificial Sequence: Synthetic oligonucleotide
  Description of Combined DNA/RNA Molecule: Synthetic oligonucleotide
gaaccgagacgaacugaautt

SEQ ID NO: 432 - DNA, 21 bp, Artificial Sequence
  Description of Artificial Sequence: Synthetic oligonucleotide
  Description of Combined DNA/RNA Molecule: Synthetic oligonucleotide
agacgaacugaauggcuuutt

SEQ ID NO: 433 - DNA, 21 bp, Artificial Sequence
  Description of Artificial Sequence: Synthetic oligonucleotide
  Description of Combined DNA/RNA Molecule: Synthetic oligonucleotide
ccaugggcgugcaagacuutt

SEQ ID NO: 434 - DNA, 21 bp, Artificial Sequence
  Description of Artificial Sequence: Synthetic oligonucleotide
  Description of Combined DNA/RNA Molecule: Synthetic oligonucleotide
gcgugcaagacuuugacautt

SEQ ID NO: 435 - RNA, 19 nt, Artificial Sequence
  Description of Artificial Sequence: Synthetic oligonucleotide
agaguaaccggaaggauua

SEQ ID NO: 436 - RNA, 19 nt, Artificial Sequence
  Description of Artificial Sequence: Synthetic oligonucleotide
gaguaaccggaaggauuaa

SEQ ID NO: 437 - RNA, 19 nt, Artificial Sequence
  Description of Artificial Sequence: Synthetic oligonucleotide
guaaccggaaggauuacua

SEQ ID NO: 438 - RNA, 19 nt, Artificial Sequence
  Description of Artificial Sequence: Synthetic oligonucleotide
cggaaggauuacucgcuga

SEQ ID NO: 439 - RNA, 19 nt, Artificial Sequence
  Description of Artificial Sequence: Synthetic oligonucleotide
ggaaggauuacucgcugaa

SEQ ID NO: 440 - RNA, 19 nt, Artificial Sequence
  Description of Artificial Sequence: Synthetic oligonucleotide
ggauuacucgcugacgaua

SEQ ID NO: 441 - RNA, 19 nt, Artificial Sequence
  Description of Artificial Sequence: Synthetic oligonucleotide
ccgugcaagagggcaugua

SEQ ID NO: 442 - RNA, 19 nt, Artificial Sequence
  Description of Artificial Sequence: Synthetic oligonucleotide
cgggcagggaaugauauaa

SEQ ID NO: 443 - RNA, 19 nt, Artificial Sequence
  Description of Artificial Sequence: Synthetic oligonucleotide
gcagggaaugauauaagca

SEQ ID NO: 444 - RNA, 19 nt, Artificial Sequence
  Description of Artificial Sequence: Synthetic oligonucleotide
ggaaugauauaagcuggaa

SEQ ID NO: 445 - DNA, 21 bp, Artificial Sequence
  Description of Artificial Sequence: Synthetic oligonucleotide
  Description of Combined DNA/RNA Molecule: Synthetic oligonucleotide
ggaacaagauggauuaucatt

SEQ ID NO: 446 - DNA, 21 bp, Artificial Sequence
  Description of Artificial Sequence: Synthetic oligonucleotide
  Description of Combined DNA/RNA Molecule: Synthetic oligonucleotide
ccauacagucaguaucaautt

SEQ ID NO: 447 - DNA, 21 bp, Artificial Sequence
  Description of Artificial Sequence: Synthetic oligonucleotide
  Description of Combined DNA/RNA Molecule: Synthetic oligonucleotide
cauuaaagauagucaucuutt

SEQ ID NO: 448 - DNA, 21 bp, Artificial Sequence
  Description of Artificial Sequence: Synthetic oligonucleotide
  Description of Combined DNA/RNA Molecule: Synthetic oligonucleotide
agguaugguuaauaaguuutt

SEQ ID NO: 449 - DNA, 21 bp, Artificial Sequence
  Description of Artificial Sequence: Synthetic oligonucleotide
  Description of Combined DNA/RNA Molecule: Synthetic oligonucleotide
gauccugguugguguugcatt

SEQ ID NO: 450 - DNA, 21 bp, Artificial Sequence
  Description of Artificial Sequence: Synthetic oligonucleotide
  Description of Combined DNA/RNA Molecule: Synthetic oligonucleotide
guaugaggucuaggaacautt

SEQ ID NO: 451 - DNA, 21 bp, Artificial Sequence
  Description of Artificial Sequence: Synthetic oligonucleotide
  Description of Combined DNA/RNA Molecule: Synthetic oligonucleotide
caucaaacucuuaguuacutt

SEQ ID NO: 452 - DNA, 21 bp, Artificial Sequence
  Description of Artificial Sequence: Synthetic oligonucleotide
  Description of Combined DNA/RNA Molecule: Synthetic oligonucleotide
cuccguauuucagacugaatt

SEQ ID NO: 453 - DNA, 21 bp, Artificial Sequence
  Description of Artificial Sequence: Synthetic oligonucleotide
  Description of Combined DNA/RNA Molecule: Synthetic oligonucleotide
gcacauacuugagacuguutt

SEQ ID NO: 454 - DNA, 21 bp, Artificial Sequence
  Description of Artificial Sequence: Synthetic oligonucleotide
  Description of Combined DNA/RNA Molecule: Synthetic oligonucleotide
gcaacgaagggaaaugucutt

SEQ ID NO: 455 - DNA, 21 bp, Artificial Sequence
  Description of Artificial Sequence: Synthetic oligonucleotide
  Description of Combined DNA/RNA Molecule: Synthetic oligonucleotide
cacggcguggccauauacatt

SEQ ID NO: 456 - DNA, 21 bp, Artificial Sequence
  Description of Artificial Sequence: Synthetic oligonucleotide
  Description of Combined DNA/RNA Molecule: Synthetic oligonucleotide
ggggauaccucauaaagcatt

SEQ ID NO: 457 - DNA, 21 bp, Artificial Sequence
  Description of Artificial Sequence: Synthetic oligonucleotide
  Description of Combined DNA/RNA Molecule: Synthetic oligonucleotide
caagcaaacggucauaagutt

SEQ ID NO: 458 - DNA, 21 bp, Artificial Sequence
  Description of Artificial Sequence: Synthetic oligonucleotide
  Description of Combined DNA/RNA Molecule: Synthetic oligonucleotide
uuguguacuaucaagucaatt

SEQ ID NO: 459 - DNA, 21 bp, Artificial Sequence
  Description of Artificial Sequence: Synthetic oligonucleotide
  Description of Combined DNA/RNA Molecule: Synthetic oligonucleotide
ccaucugcgauucauguuutt

SEQ ID NO: 460 - DNA, 21 bp, Artificial Sequence
  Description of Artificial Sequence: Synthetic oligonucleotide
  Description of Combined DNA/RNA Molecule: Synthetic oligonucleotide
cucuacacgauggauuccatt

SEQ ID NO: 461 - DNA, 21 bp, Artificial Sequence
  Description of Artificial Sequence: Synthetic oligonucleotide
  Description of Combined DNA/RNA Molecule: Synthetic oligonucleotide
cucauugcagaccggaaautt

SEQ ID NO: 462 - DNA, 21 bp, Artificial Sequence
  Description of Artificial Sequence: Synthetic oligonucleotide
  Description of Combined DNA/RNA Molecule: Synthetic oligonucleotide
accggaaauuucagcauuutt

SEQ ID NO: 463 - DNA, 21 bp, Artificial Sequence
  Description of Artificial Sequence: Synthetic oligonucleotide
  Description of Combined DNA/RNA Molecule: Synthetic oligonucleotide
ggucgaggacauuauuuuctt

SEQ ID NO: 464 - DNA, 21 bp, Artificial Sequence
  Description of Artificial Sequence: Synthetic oligonucleotide
  Description of Combined DNA/RNA Molecule: Synthetic oligonucleotide
cuuacgcugaguacuucgatt

SEQ ID NO: 465 - DNA, 21 bp, Artificial Sequence
  Description of Artificial Sequence: Synthetic oligonucleotide
  Description of Combined DNA/RNA Molecule: Synthetic oligonucleotide
ucgucagcaguuuacuugutt

SEQ ID NO: 466 - DNA, 21 bp, Artificial Sequence
  Description of Artificial Sequence: Synthetic oligonucleotide
  Description of Combined DNA/RNA Molecule: Synthetic oligonucleotide
ugcaucgucagcaguuuactt

SEQ ID NO: 467 - DNA, 21 bp, Artificial Sequence
  Description of Artificial Sequence: Synthetic oligonucleotide
  Description of Combined DNA/RNA Molecule: Synthetic oligonucleotide
gguaaauccagccaugcgatt

SEQ ID NO: 468 - DNA, 21 bp, Artificial Sequence
  Description of Artificial Sequence: Synthetic oligonucleotide
  Description of Combined DNA/RNA Molecule: Synthetic oligonucleotide
auuggccccuucccggaactt

SEQ ID NO: 469 - DNA, 21 bp, Artificial Sequence
  Description of Artificial Sequence: Synthetic oligonucleotide
  Description of Combined DNA/RNA Molecule: Synthetic oligonucleotide
uccuggucuguauuggccctt

SEQ ID NO: 470 - DNA, 21 bp, Artificial Sequence
  Description of Artificial Sequence: Synthetic oligonucleotide
  Description of Combined DNA/RNA Molecule: Synthetic oligonucleotide
cccgcaucacuucuucuggtt

SEQ ID NO: 471 - DNA, 21 bp, Artificial Sequence
  Description of Artificial Sequence: Synthetic oligonucleotide
  Description of Combined DNA/RNA Molecule: Synthetic oligonucleotide
auucacagagagccggugatt

SEQ ID NO: 472 - DNA, 21 bp, Artificial Sequence
  Description of Artificial Sequence: Synthetic oligonucleotide
  Description of Combined DNA/RNA Molecule: Synthetic oligonucleotide
gacggucuuguucgugguctt

SEQ ID NO: 473 - DNA, 21 bp, Artificial Sequence
  Description of Artificial Sequence: Synthetic oligonucleotide
  Description of Combined DNA/RNA Molecule: Synthetic oligonucleotide
gagauggacggucuuguuctt

SEQ ID NO: 474 - DNA, 21 bp, Artificial Sequence
  Description of Artificial Sequence: Synthetic oligonucleotide
  Description of Combined DNA/RNA Molecule: Synthetic oligonucleotide
acguugagauggacggucutt

SEQ ID NO: 475 - DNA, 21 bp, Artificial Sequence
  Description of Artificial Sequence: Synthetic oligonucleotide
  Description of Combined DNA/RNA Molecule: Synthetic oligonucleotide
gacacguugagauggacggtt

SEQ ID NO: 476 - DNA, 21 bp, Artificial Sequence
  Description of Artificial Sequence: Synthetic oligonucleotide
  Description of Combined DNA/RNA Molecule: Synthetic oligonucleotide
uggauacugugccgucucctt

SEQ ID NO: 477 - DNA, 21 bp, Artificial Sequence
  Description of Artificial Sequence: Synthetic oligonucleotide
  Description of Combined DNA/RNA Molecule: Synthetic oligonucleotide
cccaagacuguggauacugtt

SEQ ID NO: 478 - DNA, 21 bp, Artificial Sequence
  Description of Artificial Sequence: Synthetic oligonucleotide
  Description of Combined DNA/RNA Molecule: Synthetic oligonucleotide
uucccaagacuguggauactt

SEQ ID NO: 479 - DNA, 21 bp, Artificial Sequence
  Description of Artificial Sequence: Synthetic oligonucleotide
  Description of Combined DNA/RNA Molecule: Synthetic oligonucleotide
uucagguagaccugcugagtt

SEQ ID NO: 480 - DNA, 21 bp, Artificial Sequence
  Description of Artificial Sequence: Synthetic oligonucleotide
  Description of Combined DNA/RNA Molecule: Synthetic oligonucleotide
augcccguaucucccacgctt

SEQ ID NO: 481 - DNA, 21 bp, Artificial Sequence
  Description of Artificial Sequence: Synthetic oligonucleotide
  Description of Combined DNA/RNA Molecule: Synthetic oligonucleotide
ucuaugcccguaucucccatt

SEQ ID NO: 482 - DNA, 21 bp, Artificial Sequence
  Description of Artificial Sequence: Synthetic oligonucleotide
  Description of Combined DNA/RNA Molecule: Synthetic oligonucleotide
ccucuaugcccguaucucctt

SEQ ID NO: 483 - DNA, 21 bp, Artificial Sequence
  Description of Artificial Sequence: Synthetic oligonucleotide
  Description of Combined DNA/RNA Molecule: Synthetic oligonucleotide
cauccucuaugcccguauctt

SEQ ID NO: 484 - DNA, 21 bp, Artificial Sequence
  Description of Artificial Sequence: Synthetic oligonucleotide
  Description of Combined DNA/RNA Molecule: Synthetic oligonucleotide
uugcauccucuaugcccgutt

SEQ ID NO: 485 - DNA, 21 bp, Artificial Sequence
  Description of Artificial Sequence: Synthetic oligonucleotide
  Description of Combined DNA/RNA Molecule: Synthetic oligonucleotide
ugaucuucccgacagcucctt

SEQ ID NO: 486 - DNA, 21 bp, Artificial Sequence
  Description of Artificial Sequence: Synthetic oligonucleotide
  Description of Combined DNA/RNA Molecule: Synthetic oligonucleotide
guuggagauaaggucgcgctt

SEQ ID NO: 487 - DNA, 21 bp, Artificial Sequence
  Description of Artificial Sequence: Synthetic oligonucleotide
  Description of Combined DNA/RNA Molecule: Synthetic oligonucleotide
uuguuggagauaaggucgctt

SEQ ID NO: 488 - DNA, 21 bp, Artificial Sequence
  Description of Artificial Sequence: Synthetic oligonucleotide
  Description of Combined DNA/RNA Molecule: Synthetic oligonucleotide
ugacugucaguuuguccagtt

SEQ ID NO: 489 - DNA, 21 bp, Artificial Sequence
  Description of Artificial Sequence: Synthetic oligonucleotide
  Description of Combined DNA/RNA Molecule: Synthetic oligonucleotide
agacggguccuccaguucctt

SEQ ID NO: 490 - DNA, 21 bp, Artificial Sequence
  Description of Artificial Sequence: Synthetic oligonucleotide
  Description of Combined DNA/RNA Molecule: Synthetic oligonucleotide
uguugaagaccgccucugctt

SEQ ID NO: 491 - DNA, 21 bp, Artificial Sequence
  Description of Artificial Sequence: Synthetic oligonucleotide
  Description of Combined DNA/RNA Molecule: Synthetic oligonucleotide
ucucaugggaugagguacatt

SEQ ID NO: 492 - DNA, 21 bp, Artificial Sequence
  Description of Artificial Sequence: Synthetic oligonucleotide
  Description of Combined DNA/RNA Molecule: Synthetic oligonucleotide
uguuccgacuugguuuguctt

SEQ ID NO: 493 - DNA, 21 bp, Artificial Sequence
  Description of Artificial Sequence: Synthetic oligonucleotide
  Description of Combined DNA/RNA Molecule: Synthetic oligonucleotide
ugcuguuccgacuugguuutt

SEQ ID NO: 494 - DNA, 21 bp, Artificial Sequence
  Description of Artificial Sequence: Synthetic oligonucleotide
  Description of Combined DNA/RNA Molecule: Synthetic oligonucleotide
aacggggaucugucuagcutt

SEQ ID NO: 495 - DNA, 21 bp, Artificial Sequence
  Description of Artificial Sequence: Synthetic oligonucleotide
  Description of Combined DNA/RNA Molecule: Synthetic oligonucleotide
aucucguccaugagccuagtt

SEQ ID NO: 496 - DNA, 21 bp, Artificial Sequence
  Description of Artificial Sequence: Synthetic oligonucleotide
  Description of Combined DNA/RNA Molecule: Synthetic oligonucleotide
uguaggguuaucccuucuctt

SEQ ID NO: 497 - DNA, 21 bp, Artificial Sequence
  Description of Artificial Sequence: Synthetic oligonucleotide
  Description of Combined DNA/RNA Molecule: Synthetic oligonucleotide
uauggguggaaaacauuggtt

SEQ ID NO: 498 - DNA, 21 bp, Artificial Sequence
  Description of Artificial Sequence: Synthetic oligonucleotide
  Description of Combined DNA/RNA Molecule: Synthetic oligonucleotide
aggauuauggguggaaaactt

SEQ ID NO: 499 - DNA, 21 bp, Artificial Sequence
  Description of Artificial Sequence: Synthetic oligonucleotide
  Description of Combined DNA/RNA Molecule: Synthetic oligonucleotide
ucggcagaaaggauuauggtt

SEQ ID NO: 500 - DNA, 21 bp, Artificial Sequence
  Description of Artificial Sequence: Synthetic oligonucleotide
  Description of Combined DNA/RNA Molecule: Synthetic oligonucleotide
aagcugauaacaagcuuggtt

SEQ ID NO: 501 - DNA, 21 bp, Artificial Sequence
  Description of Artificial Sequence: Synthetic oligonucleotide
  Description of Combined DNA/RNA Molecule: Synthetic oligonucleotide
ucuaaugugaaccauggcctt

SEQ ID NO: 502 - DNA, 21 bp, Artificial Sequence
  Description of Artificial Sequence: Synthetic oligonucleotide
  Description of Combined DNA/RNA Molecule: Synthetic oligonucleotide
ugguaacacagauauccggtt

SEQ ID NO: 503 - DNA, 21 bp, Artificial Sequence
  Description of Artificial Sequence: Synthetic oligonucleotide
  Description of Combined DNA/RNA Molecule: Synthetic oligonucleotide
aguuucaagcuacucaugctt

SEQ ID NO: 504 - DNA, 21 bp, Artificial Sequence
  Description of Artificial Sequence: Synthetic oligonucleotide
  Description of Combined DNA/RNA Molecule: Synthetic oligonucleotide
uccuugauagagcccaugctt

SEQ ID NO: 505 - DNA, 21 bp, Artificial Sequence
  Description of Artificial Sequence: Synthetic oligonucleotide
  Description of Combined DNA/RNA Molecule: Synthetic oligonucleotide
aagaugcucagauauuagutt

SEQ ID NO: 506 - DNA, 21 bp, Artificial Sequence
  Description of Artificial Sequence: Synthetic oligonucleotide
  Description of Combined DNA/RNA Molecule: Synthetic oligonucleotide
auguugggccauuaaaucctt

SEQ ID NO: 507 - DNA, 21 bp, Artificial Sequence
  Description of Artificial Sequence: Synthetic oligonucleotide
  Description of Combined DNA/RNA Molecule: Synthetic oligonucleotide
ugaaaugagaucuugcccutt

SEQ ID NO: 508 - DNA, 21 bp, Artificial Sequence
  Description of Artificial Sequence: Synthetic oligonucleotide
  Description of Combined DNA/RNA Molecule: Synthetic oligonucleotide
aauaaggcccucuaauaaatt

SEQ ID NO: 509 - DNA, 21 bp, Artificial Sequence
  Description of Artificial Sequence: Synthetic oligonucleotide
  Description of Combined DNA/RNA Molecule: Synthetic oligonucleotide
agacuuagaacacaucaautt

SEQ ID NO: 510 - DNA, 21 bp, Artificial Sequence
  Description of Artificial Sequence: Synthetic oligonucleotide
  Description of Combined DNA/RNA Molecule: Synthetic oligonucleotide
uucucggcuucaucugccctt

SEQ ID NO: 511 - DNA, 21 bp, Artificial Sequence
  Description of Artificial Sequence: Synthetic oligonucleotide
  Description of Combined DNA/RNA Molecule: Synthetic oligonucleotide
agguacucauauucgguggtt

SEQ ID NO: 512 - DNA, 21 bp, Artificial Sequence
  Description of Artificial Sequence: Synthetic oligonucleotide
  Description of Combined DNA/RNA Molecule: Synthetic oligonucleotide
ucuagguacucauauucggtt

SEQ ID NO: 513 - DNA, 21 bp, Artificial Sequence
  Description of Artificial Sequence: Synthetic oligonucleotide
  Description of Combined DNA/RNA Molecule: Synthetic oligonucleotide
uggguugaguggucugugctt

SEQ ID NO: 514 - DNA, 21 bp, Artificial Sequence
  Description of Artificial Sequence: Synthetic oligonucleotide
  Description of Combined DNA/RNA Molecule: Synthetic oligonucleotide
ugaacagaccucuuuuggutt

SEQ ID NO: 515 - DNA, 21 bp, Artificial Sequence
  Description of Artificial Sequence: Synthetic oligonucleotide
  Description of Combined DNA/RNA Molecule: Synthetic oligonucleotide
uccacuugcccgucugcuutt

SEQ ID NO: 516 - DNA, 21 bp, Artificial Sequence
  Description of Artificial Sequence: Synthetic oligonucleotide
  Description of Combined DNA/RNA Molecule: Synthetic oligonucleotide
uccgucacucuucaguacutt

SEQ ID NO: 517 - DNA, 21 bp, Artificial Sequence
  Description of Artificial Sequence: Synthetic oligonucleotide
  Description of Combined DNA/RNA Molecule: Synthetic oligonucleotide
aaguccgucacucuucagutt

SEQ ID NO: 518 - DNA, 21 bp, Artificial Sequence
  Description of Artificial Sequence: Synthetic oligonucleotide
  Description of Combined DNA/RNA Molecule: Synthetic oligonucleotide
aagaaaggucugcccuuggtt

SEQ ID NO: 519 - DNA, 21 bp, Artificial Sequence
  Description of Artificial Sequence: Synthetic oligonucleotide
  Description of Combined DNA/RNA Molecule: Synthetic oligonucleotide
aagacuuggguguagccuutt

SEQ ID NO: 520 - DNA, 21 bp, Artificial Sequence
  Description of Artificial Sequence: Synthetic oligonucleotide
  Description of Combined DNA/RNA Molecule: Synthetic oligonucleotide
agaagagucacguagaaagtt

SEQ ID NO: 521 - DNA, 21 bp, Artificial Sequence
  Description of Artificial Sequence: Synthetic oligonucleotide
  Description of Combined DNA/RNA Molecule: Synthetic oligonucleotide
ucucucacgacuugguugctt

SEQ ID NO: 522 - DNA, 21 bp, Artificial Sequence
  Description of Artificial Sequence: Synthetic oligonucleotide
  Description of Combined DNA/RNA Molecule: Synthetic oligonucleotide
aguaaucuuaucucucacgtt

SEQ ID NO: 523 - DNA, 21 bp, Artificial Sequence
  Description of Artificial Sequence: Synthetic oligonucleotide
  Description of Combined DNA/RNA Molecule: Synthetic oligonucleotide
ucguagacaugcucuuguutt

SEQ ID NO: 524 - DNA, 21 bp, Artificial Sequence
  Description of Artificial Sequence: Synthetic oligonucleotide
  Description of Combined DNA/RNA Molecule: Synthetic oligonucleotide
ugaugaccaaguccuagugtt

SEQ ID NO: 525 - DNA, 21 bp, Artificial Sequence
  Description of Artificial Sequence: Synthetic oligonucleotide
  Description of Combined DNA/RNA Molecule: Synthetic oligonucleotide
augaugaccaaguccuagutt

SEQ ID NO: 526 - DNA, 21 bp, Artificial Sequence
  Description of Artificial Sequence: Synthetic oligonucleotide
  Description of Combined DNA/RNA Molecule: Synthetic oligonucleotide
ugucuguaggcaugaugactt

SEQ ID NO: 527 - DNA, 21 bp, Artificial Sequence
  Description of Artificial Sequence: Synthetic oligonucleotide
  Description of Combined DNA/RNA Molecule: Synthetic oligonucleotide
aauuaaaagcugucuggcctt

SEQ ID NO: 528 - DNA, 21 bp, Artificial Sequence
  Description of Artificial Sequence: Synthetic oligonucleotide
  Description of Combined DNA/RNA Molecule: Synthetic oligonucleotide
ucgcuggcguuccucuggctt

SEQ ID NO: 529 - DNA, 21 bp, Artificial Sequence
  Description of Artificial Sequence: Synthetic oligonucleotide
  Description of Combined DNA/RNA Molecule: Synthetic oligonucleotide
augcuggaaaagcgacggctt

SEQ ID NO: 530 - DNA, 21 bp, Artificial Sequence
  Description of Artificial Sequence: Synthetic oligonucleotide
  Description of Combined DNA/RNA Molecule: Synthetic oligonucleotide
agcucucgcaggccguucctt

SEQ ID NO: 531 - DNA, 21 bp, Artificial Sequence
  Description of Artificial Sequence: Synthetic oligonucleotide
  Description of Combined DNA/RNA Molecule: Synthetic oligonucleotide
aacauguucucauagucggtt

SEQ ID NO: 532 - DNA, 21 bp, Artificial Sequence
  Description of Artificial Sequence: Synthetic oligonucleotide
  Description of Combined DNA/RNA Molecule: Synthetic oligonucleotide
agguuaggacaucuuaggctt

SEQ ID NO: 533 - DNA, 21 bp, Artificial Sequence
  Description of Artificial Sequence: Synthetic oligonucleotide
  Description of Combined DNA/RNA Molecule: Synthetic oligonucleotide
agccucgaagcauuuauugtt

SEQ ID NO: 534 - DNA, 21 bp, Artificial Sequence
  Description of Artificial Sequence: Synthetic oligonucleotide
  Description of Combined DNA/RNA Molecule: Synthetic oligonucleotide
agccucaucagccucgaagtt

SEQ ID NO: 535 - DNA, 21 bp, Artificial Sequence
  Description of Artificial Sequence: Synthetic oligonucleotide
  Description of Combined DNA/RNA Molecule: Synthetic oligonucleotide
uaucgccauuuccauuaagtt

SEQ ID NO: 536 - DNA, 21 bp, Artificial Sequence
  Description of Artificial Sequence: Synthetic oligonucleotide
  Description of Combined DNA/RNA Molecule: Synthetic oligonucleotide
aauaucgccauuuccauuatt

SEQ ID NO: 537 - DNA, 21 bp, Artificial Sequence
  Description of Artificial Sequence: Synthetic oligonucleotide
  Description of Combined DNA/RNA Molecule: Synthetic oligonucleotide
ucguuucagggacaugauatt

SEQ ID NO: 538 - DNA, 21 bp, Artificial Sequence
  Description of Artificial Sequence: Synthetic oligonucleotide
  Description of Combined DNA/RNA Molecule: Synthetic oligonucleotide
uuucuccagcauucguuuctt

SEQ ID NO: 539 - DNA, 21 bp, Artificial Sequence
  Description of Artificial Sequence: Synthetic oligonucleotide
  Description of Combined DNA/RNA Molecule: Synthetic oligonucleotide
uuuagcucuaggugagucutt

SEQ ID NO: 540 - DNA, 21 bp, Artificial Sequence
  Description of Artificial Sequence: Synthetic oligonucleotide
  Description of Combined DNA/RNA Molecule: Synthetic oligonucleotide
uucuuuagcucuaggugagtt

SEQ ID NO: 541 - DNA, 21 bp, Artificial Sequence
  Description of Artificial Sequence: Synthetic oligonucleotide
  Description of Combined DNA/RNA Molecule: Synthetic oligonucleotide
uuucuuuagcucuaggugatt

SEQ ID NO: 542 - DNA, 21 bp, Artificial Sequence
  Description of Artificial Sequence: Synthetic oligonucleotide
  Description of Combined DNA/RNA Molecule: Synthetic oligonucleotide
aauuucuuuagcucuaggutt

SEQ ID NO: 543 - DNA, 21 bp, Artificial Sequence
  Description of Artificial Sequence: Synthetic oligonucleotide
  Description of Combined DNA/RNA Molecule: Synthetic oligonucleotide
uaauuucuuuagcucuaggtt

SEQ ID NO: 544 - DNA, 21 bp, Artificial Sequence
  Description of Artificial Sequence: Synthetic oligonucleotide
  Description of Combined DNA/RNA Molecule: Synthetic oligonucleotide
uagcugaacgucuccccggtt

SEQ ID NO: 545 - DNA, 21 bp, Artificial Sequence
  Description of Artificial Sequence: Synthetic oligonucleotide
  Description of Combined DNA/RNA Molecule: Synthetic oligonucleotide
acucuguguaauuuuuggutt

SEQ ID NO: 546 - DNA, 21 bp, Artificial Sequence
  Description of Artificial Sequence: Synthetic oligonucleotide
  Description of Combined DNA/RNA Molecule: Synthetic oligonucleotide
uuugaaggacauuacccuctt

SEQ ID NO: 547 - DNA, 21 bp, Artificial Sequence
  Description of Artificial Sequence: Synthetic oligonucleotide
  Description of Combined DNA/RNA Molecule: Synthetic oligonucleotide
agauuugaaggacauuacctt

SEQ ID NO: 548 - DNA, 21 bp, Artificial Sequence
  Description of Artificial Sequence: Synthetic oligonucleotide
  Description of Combined DNA/RNA Molecule: Synthetic oligonucleotide
uccuuaaaugaucauaugatt

SEQ ID NO: 549 - DNA, 21 bp, Artificial Sequence
  Description of Artificial Sequence: Synthetic oligonucleotide
  Description of Combined DNA/RNA Molecule: Synthetic oligonucleotide
uucggaauaaacuguguuctt

SEQ ID NO: 550 - DNA, 21 bp, Artificial Sequence
  Description of Artificial Sequence: Synthetic oligonucleotide
  Description of Combined DNA/RNA Molecule: Synthetic oligonucleotide
uuggauuauacccaguucctt

SEQ ID NO: 551 - DNA, 21 bp, Artificial Sequence
  Description of Artificial Sequence: Synthetic oligonucleotide
  Description of Combined DNA/RNA Molecule: Synthetic oligonucleotide
ugcuaaugguaguuggugctt

SEQ ID NO: 552 - DNA, 21 bp, Artificial Sequence
  Description of Artificial Sequence: Synthetic oligonucleotide
  Description of Combined DNA/RNA Molecule: Synthetic oligonucleotide
uucagcguuaacuguagugtt

SEQ ID NO: 553 - DNA, 21 bp, Artificial Sequence
  Description of Artificial Sequence: Synthetic oligonucleotide
  Description of Combined DNA/RNA Molecule: Synthetic oligonucleotide
aauuuugauuccugauacctt

SEQ ID NO: 554 - DNA, 21 bp, Artificial Sequence
  Description of Artificial Sequence: Synthetic oligonucleotide
  Description of Combined DNA/RNA Molecule: Synthetic oligonucleotide
aauuaguuaugcuguaaggtt

SEQ ID NO: 555 - DNA, 21 bp, Artificial Sequence
  Description of Artificial Sequence: Synthetic oligonucleotide
  Description of Combined DNA/RNA Molecule: Synthetic oligonucleotide
acuuuauggugacggccuctt

SEQ ID NO: 556 - DNA, 21 bp, Artificial Sequence
  Description of Artificial Sequence: Synthetic oligonucleotide
  Description of Combined DNA/RNA Molecule: Synthetic oligonucleotide
ucuguuuagcucucgcuuctt

SEQ ID NO: 557 - DNA, 21 bp, Artificial Sequence
  Description of Artificial Sequence: Synthetic oligonucleotide
  Description of Combined DNA/RNA Molecule: Synthetic oligonucleotide
ugaaaaauacgccgagcactt

SEQ ID NO: 558 - DNA, 21 bp, Artificial Sequence
  Description of Artificial Sequence: Synthetic oligonucleotide
  Description of Combined DNA/RNA Molecule: Synthetic oligonucleotide
ucucuuaugguauaguucutt

SEQ ID NO: 559 - DNA, 21 bp, Artificial Sequence
  Description of Artificial Sequence: Synthetic oligonucleotide
  Description of Combined DNA/RNA Molecule: Synthetic oligonucleotide
uuccacaugucucuuauggtt

SEQ ID NO: 560 - DNA, 21 bp, Artificial Sequence
  Description of Artificial Sequence: Synthetic oligonucleotide
  Description of Combined DNA/RNA Molecule: Synthetic oligonucleotide
uuaaaacguuucuauggcctt

SEQ ID NO: 561 - DNA, 21 bp, Artificial Sequence
  Description of Artificial Sequence: Synthetic oligonucleotide
  Description of Combined DNA/RNA Molecule: Synthetic oligonucleotide
aauuaaaacguuucuauggtt

SEQ ID NO: 562 - DNA, 21 bp, Artificial Sequence
  Description of Artificial Sequence: Synthetic oligonucleotide
  Description of Combined DNA/RNA Molecule: Synthetic oligonucleotide
aagaccugaugauauaugutt

SEQ ID NO: 563 - DNA, 21 bp, Artificial Sequence
  Description of Artificial Sequence: Synthetic oligonucleotide
  Description of Combined DNA/RNA Molecule: Synthetic oligonucleotide
aaagaagaggcgugcgucgtt

SEQ ID NO: 564 - DNA, 21 bp, Artificial Sequence
  Description of Artificial Sequence: Synthetic oligonucleotide
  Description of Combined DNA/RNA Molecule: Synthetic oligonucleotide
uaguacuugaagcgcagcctt

SEQ ID NO: 565 - DNA, 21 bp, Artificial Sequence
  Description of Artificial Sequence: Synthetic oligonucleotide
  Description of Combined DNA/RNA Molecule: Synthetic oligonucleotide
agacguuaacaucgggaactt

SEQ ID NO: 566 - DNA, 21 bp, Artificial Sequence
  Description of Artificial Sequence: Synthetic oligonucleotide
  Description of Combined DNA/RNA Molecule: Synthetic oligonucleotide
uguacaauucggcagcuggtt

SEQ ID NO: 567 - DNA, 21 bp, Artificial Sequence
  Description of Artificial Sequence: Synthetic oligonucleotide
  Description of Combined DNA/RNA Molecule: Synthetic oligonucleotide
ucguguacaauucggcagctt

SEQ ID NO: 568 - DNA, 21 bp, Artificial Sequence
  Description of Artificial Sequence: Synthetic oligonucleotide
  Description of Combined DNA/RNA Molecule: Synthetic oligonucleotide
uucaucauccuguagcuactt

SEQ ID NO: 569 - DNA, 21 bp, Artificial Sequence
  Description of Artificial Sequence: Synthetic oligonucleotide
  Description of Combined DNA/RNA Molecule: Synthetic oligonucleotide
agcaguagcaauuccagagtt

SEQ ID NO: 570 - DNA, 21 bp, Artificial Sequence
  Description of Artificial Sequence: Synthetic oligonucleotide
  Description of Combined DNA/RNA Molecule: Synthetic oligonucleotide
aaguauaaaaccagguuagtt

SEQ ID NO: 571 - DNA, 21 bp, Artificial Sequence
  Description of Artificial Sequence: Synthetic oligonucleotide
  Description of Combined DNA/RNA Molecule: Synthetic oligonucleotide
acaaucuucuggucgaaagtt

SEQ ID NO: 572 - DNA, 21 bp, Artificial Sequence
  Description of Artificial Sequence: Synthetic oligonucleotide
  Description of Combined DNA/RNA Molecule: Synthetic oligonucleotide
aguacuuagauuuucuggatt

SEQ ID NO: 573 - DNA, 21 bp, Artificial Sequence
  Description of Artificial Sequence: Synthetic oligonucleotide
  Description of Combined DNA/RNA Molecule: Synthetic oligonucleotide
ugccuuuaaauuuggauuctt

SEQ ID NO: 574 - DNA, 21 bp, Artificial Sequence
  Description of Artificial Sequence: Synthetic oligonucleotide
  Description of Combined DNA/RNA Molecule: Synthetic oligonucleotide
uuuugaugacaggcuugggtt

SEQ ID NO: 575 - DNA, 21 bp, Artificial Sequence
  Description of Artificial Sequence: Synthetic oligonucleotide
  Description of Combined DNA/RNA Molecule: Synthetic oligonucleotide
aguuucagauaacaguugutt

SEQ ID NO: 576 - DNA, 21 bp, Artificial Sequence
  Description of Artificial Sequence: Synthetic oligonucleotide
  Description of Combined DNA/RNA Molecule: Synthetic oligonucleotide
aguuuacagacucgccaggtt

SEQ ID NO: 577 - DNA, 21 bp, Artificial Sequence
  Description of Artificial Sequence: Synthetic oligonucleotide
  Description of Combined DNA/RNA Molecule: Synthetic oligonucleotide
uaguuuacagacucgccagtt

SEQ ID NO: 578 - DNA, 21 bp, Artificial Sequence
  Description of Artificial Sequence: Synthetic oligonucleotide
  Description of Combined DNA/RNA Molecule: Synthetic oligonucleotide
ugacuuggcaaguauaacatt

SEQ ID NO: 579 - DNA, 21 bp, Artificial Sequence
  Description of Artificial Sequence: Synthetic oligonucleotide
  Description of Combined DNA/RNA Molecule: Synthetic oligonucleotide
agguuuuuggaguggccggtt

SEQ ID NO: 580 - DNA, 21 bp, Artificial Sequence
  Description of Artificial Sequence: Synthetic oligonucleotide
  Description of Combined DNA/RNA Molecule: Synthetic oligonucleotide
agugaguaguccuggggcctt

SEQ ID NO: 581 - DNA, 21 bp, Artificial Sequence
  Description of Artificial Sequence: Synthetic oligonucleotide
  Description of Combined DNA/RNA Molecule: Synthetic oligonucleotide
auuaugagcaccgaggagutt

SEQ ID NO: 582 - DNA, 21 bp, Artificial Sequence
  Description of Artificial Sequence: Synthetic oligonucleotide
  Description of Combined DNA/RNA Molecule: Synthetic oligonucleotide
uggaacauaggugacguugtt

SEQ ID NO: 583 - DNA, 21 bp, Artificial Sequence
  Description of Artificial Sequence: Synthetic oligonucleotide
  Description of Combined DNA/RNA Molecule: Synthetic oligonucleotide
uucuguggaacauaggugatt

SEQ ID NO: 584 - DNA, 21 bp, Artificial Sequence
  Description of Artificial Sequence: Synthetic oligonucleotide
  Description of Combined DNA/RNA Molecule: Synthetic oligonucleotide
aaagauaccaguuguugggtt

SEQ ID NO: 585 - DNA, 21 bp, Artificial Sequence
  Description of Artificial Sequence: Synthetic oligonucleotide
  Description of Combined DNA/RNA Molecule: Synthetic oligonucleotide
ugaaccacuccugcucuggtt

SEQ ID NO: 586 - DNA, 21 bp, Artificial Sequence
  Description of Artificial Sequence: Synthetic oligonucleotide
  Description of Combined DNA/RNA Molecule: Synthetic oligonucleotide
uccaauggccccaugaacctt

SEQ ID NO: 587 - DNA, 21 bp, Artificial Sequence
  Description of Artificial Sequence: Synthetic oligonucleotide
  Description of Combined DNA/RNA Molecule: Synthetic oligonucleotide
uuuuaggcgaaaugaucagtt

SEQ ID NO: 588 - DNA, 21 bp, Artificial Sequence
  Description of Artificial Sequence: Synthetic oligonucleotide
  Description of Combined DNA/RNA Molecule: Synthetic oligonucleotide
ugcucuuuuaggcgaaaugtt

SEQ ID NO: 589 - DNA, 21 bp, Artificial Sequence
  Description of Artificial Sequence: Synthetic oligonucleotide
  Description of Combined DNA/RNA Molecule: Synthetic oligonucleotide
aguccuugcucuuuuaggctt

SEQ ID NO: 590 - DNA, 21 bp, Artificial Sequence
  Description of Artificial Sequence: Synthetic oligonucleotide
  Description of Combined DNA/RNA Molecule: Synthetic oligonucleotide
agaugcauaguggaguucctt

SEQ ID NO: 591 - DNA, 21 bp, Artificial Sequence
  Description of Artificial Sequence: Synthetic oligonucleotide
  Description of Combined DNA/RNA Molecule: Synthetic oligonucleotide
agcucuuggauccuccuugtt

SEQ ID NO: 592 - DNA, 21 bp, Artificial Sequence
  Description of Artificial Sequence: Synthetic oligonucleotide
  Description of Combined DNA/RNA Molecule: Synthetic oligonucleotide
auagucagcucuuggaucctt

SEQ ID NO: 593 - DNA, 21 bp, Artificial Sequence
  Description of Artificial Sequence: Synthetic oligonucleotide
  Description of Combined DNA/RNA Molecule: Synthetic oligonucleotide
uuugaacggaggcucgagatt

SEQ ID NO: 594 - DNA, 21 bp, Artificial Sequence
  Description of Artificial Sequence: Synthetic oligonucleotide
  Description of Combined DNA/RNA Molecule: Synthetic oligonucleotide
augaucaauuugaacggagtt

SEQ ID NO: 595 - DNA, 21 bp, Artificial Sequence
  Description of Artificial Sequence: Synthetic oligonucleotide
  Description of Combined DNA/RNA Molecule: Synthetic oligonucleotide
uaaguuuugaugaugaucatt

SEQ ID NO: 596 - DNA, 21 bp, Artificial Sequence
  Description of Artificial Sequence: Synthetic oligonucleotide
  Description of Combined DNA/RNA Molecule: Synthetic oligonucleotide
aaauucccuauucaaaggutt

SEQ ID NO: 597 - DNA, 21 bp, Artificial Sequence
  Description of Artificial Sequence: Synthetic oligonucleotide
  Description of Combined DNA/RNA Molecule: Synthetic oligonucleotide
agagaucacggccuggucctt

SEQ ID NO: 598 - DNA, 21 bp, Artificial Sequence
  Description of Artificial Sequence: Synthetic oligonucleotide
  Description of Combined DNA/RNA Molecule: Synthetic oligonucleotide
aagagaucuccaccugacctt

SEQ ID NO: 599 - DNA, 21 bp, Artificial Sequence
  Description of Artificial Sequence: Synthetic oligonucleotide
  Description of Combined DNA/RNA Molecule: Synthetic oligonucleotide
uugguagcgauacauuaaatt

SEQ ID NO: 600 - DNA, 21 bp, Artificial Sequence
  Description of Artificial Sequence: Synthetic oligonucleotide
  Description of Combined DNA/RNA Molecule: Synthetic oligonucleotide
cuuuuucaggugucgauuutt

SEQ ID NO: 601 - DNA, 21 bp, Artificial Sequence
  Description of Artificial Sequence: Synthetic oligonucleotide
  Description of Combined DNA/RNA Molecule: Synthetic oligonucleotide
aauuccuuccagcgcaacgtt

SEQ ID NO: 602 - DNA, 21 bp, Artificial Sequence
  Description of Artificial Sequence: Synthetic oligonucleotide
  Description of Combined DNA/RNA Molecule: Synthetic oligonucleotide
uguauugcgccucgcgcagtt

SEQ ID NO: 603 - DNA, 21 bp, Artificial Sequence
  Description of Artificial Sequence: Synthetic oligonucleotide
  Description of Combined DNA/RNA Molecule: Synthetic oligonucleotide
aagcuauguacaucgagggtt

SEQ ID NO: 604 - DNA, 21 bp, Artificial Sequence
  Description of Artificial Sequence: Synthetic oligonucleotide
  Description of Combined DNA/RNA Molecule: Synthetic oligonucleotide
aaacugcuuaugcacugugtt

SEQ ID NO: 605 - DNA, 21 bp, Artificial Sequence
  Description of Artificial Sequence: Synthetic oligonucleotide
  Description of Combined DNA/RNA Molecule: Synthetic oligonucleotide
aguguaacaugauugauuutt

SEQ ID NO: 606 - DNA, 21 bp, Artificial Sequence
  Description of Artificial Sequence: Synthetic oligonucleotide
  Description of Combined DNA/RNA Molecule: Synthetic oligonucleotide
aguucagcuugcuaugugctt

SEQ ID NO: 607 - DNA, 21 bp, Artificial Sequence
  Description of Artificial Sequence: Synthetic oligonucleotide
  Description of Combined DNA/RNA Molecule: Synthetic oligonucleotide
ucuacgacgucccgcaagctt

SEQ ID NO: 608 - DNA, 21 bp, Artificial Sequence
  Description of Artificial Sequence: Synthetic oligonucleotide
  Description of Combined DNA/RNA Molecule: Synthetic oligonucleotide
ugguuuucucuacgacguctt

SEQ ID NO: 609 - DNA, 21 bp, Artificial Sequence
  Description of Artificial Sequence: Synthetic oligonucleotide
  Description of Combined DNA/RNA Molecule: Synthetic oligonucleotide
auuguggagucguuggucgtt

SEQ ID NO: 610 - DNA, 21 bp, Artificial Sequence
  Description of Artificial Sequence: Synthetic oligonucleotide
  Description of Combined DNA/RNA Molecule: Synthetic oligonucleotide
aggauuguggagucguuggtt

SEQ ID NO: 611 - DNA, 21 bp, Artificial Sequence
  Description of Artificial Sequence: Synthetic oligonucleotide
  Description of Combined DNA/RNA Molecule: Synthetic oligonucleotide
accuuaucuaggauuguggtt

SEQ ID NO: 612 - DNA, 21 bp, Artificial Sequence
  Description of Artificial Sequence: Synthetic oligonucleotide
  Description of Combined DNA/RNA Molecule: Synthetic oligonucleotide
auaagguuguugugcagcctt

SEQ ID NO: 613 - DNA, 21 bp, Artificial Sequence
  Description of Artificial Sequence: Synthetic oligonucleotide
  Description of Combined DNA/RNA Molecule: Synthetic oligonucleotide
uaucgagagcgucaugaactt

SEQ ID NO: 614 - DNA, 21 bp, Artificial Sequence
  Description of Artificial Sequence: Synthetic oligonucleotide
  Description of Combined DNA/RNA Molecule: Synthetic oligonucleotide
aacgguaucgagcgagccgtt

SEQ ID NO: 615 - DNA, 21 bp, Artificial Sequence
  Description of Artificial Sequence: Synthetic oligonucleotide
  Description of Combined DNA/RNA Molecule: Synthetic oligonucleotide
aaauaaucuuguggguggutt

SEQ ID NO: 616 - DNA, 21 bp, Artificial Sequence
  Description of Artificial Sequence: Synthetic oligonucleotide
  Description of Combined DNA/RNA Molecule: Synthetic oligonucleotide
uuggcguugguauagaucctt

SEQ ID NO: 617 - DNA, 21 bp, Artificial Sequence
  Description of Artificial Sequence: Synthetic oligonucleotide
  Description of Combined DNA/RNA Molecule: Synthetic oligonucleotide
aauacucgugcguuuggcgtt

SEQ ID NO: 618 - DNA, 21 bp, Artificial Sequence
  Description of Artificial Sequence: Synthetic oligonucleotide
  Description of Combined DNA/RNA Molecule: Synthetic oligonucleotide
aaguuguucucggcgaagctt

SEQ ID NO: 619 - DNA, 21 bp, Artificial Sequence
  Description of Artificial Sequence: Synthetic oligonucleotide
  Description of Combined DNA/RNA Molecule: Synthetic oligonucleotide
augcuguccuucaugucgctt

SEQ ID NO: 620 - DNA, 21 bp, Artificial Sequence
  Description of Artificial Sequence: Synthetic oligonucleotide
  Description of Combined DNA/RNA Molecule: Synthetic oligonucleotide
uaaugcuauggccagcgggtt

SEQ ID NO: 621 - DNA, 21 bp, Artificial Sequence
  Description of Artificial Sequence: Synthetic oligonucleotide
  Description of Combined DNA/RNA Molecule: Synthetic oligonucleotide
uuacauacggacuugagactt

SEQ ID NO: 622 - DNA, 21 bp, Artificial Sequence
  Description of Artificial Sequence: Synthetic oligonucleotide
  Description of Combined DNA/RNA Molecule: Synthetic oligonucleotide
uuuacauacggacuugagatt

SEQ ID NO: 623 - DNA, 21 bp, Artificial Sequence
  Description of Artificial Sequence: Synthetic oligonucleotide
  Description of Combined DNA/RNA Molecule: Synthetic oligonucleotide
agaucugauuuacauacggtt

SEQ ID NO: 624 - DNA, 21 bp, Artificial Sequence
  Description of Artificial Sequence: Synthetic oligonucleotide
  Description of Combined DNA/RNA Molecule: Synthetic oligonucleotide
ugagaauaacuuuacuugutt

SEQ ID NO: 625 - DNA, 21 bp, Artificial Sequence
  Description of Artificial Sequence: Synthetic oligonucleotide
  Description of Combined DNA/RNA Molecule: Synthetic oligonucleotide
auggauugagaauaacuuutt

SEQ ID NO: 626 - DNA, 21 bp, Artificial Sequence
  Description of Artificial Sequence: Synthetic oligonucleotide
  Description of Combined DNA/RNA Molecule: Synthetic oligonucleotide
agucauccugagugcucactt

SEQ ID NO: 627 - DNA, 21 bp, Artificial Sequence
  Description of Artificial Sequence: Synthetic oligonucleotide
  Description of Combined DNA/RNA Molecule: Synthetic oligonucleotide
acggacuguggguguuuuctt

SEQ ID NO: 628 - DNA, 21 bp, Artificial Sequence
  Description of Artificial Sequence: Synthetic oligonucleotide
  Description of Combined DNA/RNA Molecule: Synthetic oligonucleotide
auuaaugcagcacggacugtt

SEQ ID NO: 629 - DNA, 21 bp, Artificial Sequence
  Description of Artificial Sequence: Synthetic oligonucleotide
  Description of Combined DNA/RNA Molecule: Synthetic oligonucleotide
agauuaaugcagcacggactt

SEQ ID NO: 630 - DNA, 21 bp, Artificial Sequence
  Description of Artificial Sequence: Synthetic oligonucleotide
  Description of Combined DNA/RNA Molecule: Synthetic oligonucleotide
uccacacgaccuuucagcatt

SEQ ID NO: 631 - DNA, 21 bp, Artificial Sequence
  Description of Artificial Sequence: Synthetic oligonucleotide
  Description of Combined DNA/RNA Molecule: Synthetic oligonucleotide
accaucuggaucugaacgctt

SEQ ID NO: 632 - DNA, 21 bp, Artificial Sequence
  Description of Artificial Sequence: Synthetic oligonucleotide
  Description of Combined DNA/RNA Molecule: Synthetic oligonucleotide
ugcccggaucuuuguauuutt

SEQ ID NO: 633 - DNA, 21 bp, Artificial Sequence
  Description of Artificial Sequence: Synthetic oligonucleotide
  Description of Combined DNA/RNA Molecule: Synthetic oligonucleotide
uugagcaacuugcucauautt

SEQ ID NO: 634 - DNA, 21 bp, Artificial Sequence
  Description of Artificial Sequence: Synthetic oligonucleotide
  Description of Combined DNA/RNA Molecule: Synthetic oligonucleotide
agaaaccaccuguagaauatt

SEQ ID NO: 635 - DNA, 21 bp, Artificial Sequence
  Description of Artificial Sequence: Synthetic oligonucleotide
  Description of Combined DNA/RNA Molecule: Synthetic oligonucleotide
agaacugcucggcacuauatt

SEQ ID NO: 636 - DNA, 21 bp, Artificial Sequence
  Description of Artificial Sequence: Synthetic oligonucleotide
  Description of Combined DNA/RNA Molecule: Synthetic oligonucleotide
tguguaauccaagaugcuguu

SEQ ID NO: 637 - DNA, 21 bp, Artificial Sequence
  Description of Artificial Sequence: Synthetic oligonucleotide
  Description of Combined DNA/RNA Molecule: Synthetic oligonucleotide
tcaagcucuggucguauccuu

SEQ ID NO: 638 - DNA, 21 bp, Artificial Sequence
  Description of Artificial Sequence: Synthetic oligonucleotide
  Description of Combined DNA/RNA Molecule: Synthetic oligonucleotide
tuacugacagccauaucgcuu

SEQ ID NO: 639 - DNA, 21 bp, Artificial Sequence
  Description of Artificial Sequence: Synthetic oligonucleotide
  Description of Combined DNA/RNA Molecule: Synthetic oligonucleotide
tuucaagucauaaccauaguu

SEQ ID NO: 640 - DNA, 21 bp, Artificial Sequence
  Description of Artificial Sequence: Synthetic oligonucleotide
  Description of Combined DNA/RNA Molecule: Synthetic oligonucleotide
tagaguucaagucauaaccuu

SEQ ID NO: 641 - DNA, 21 bp, Artificial Sequence
  Description of Artificial Sequence: Synthetic oligonucleotide
  Description of Combined DNA/RNA Molecule: Synthetic oligonucleotide
tugagaugaagggugugccuu

SEQ ID NO: 642 - DNA, 21 bp, Artificial Sequence
  Description of Artificial Sequence: Synthetic oligonucleotide
  Description of Combined DNA/RNA Molecule: Synthetic oligonucleotide
tgaucuuagacggaguggguu

SEQ ID NO: 643 - DNA, 21 bp, Artificial Sequence
  Description of Artificial Sequence: Synthetic oligonucleotide
  Description of Combined DNA/RNA Molecule: Synthetic oligonucleotide
tugaucuuagacggagugguu

SEQ ID NO: 644 - DNA, 21 bp, Artificial Sequence
  Description of Artificial Sequence: Synthetic oligonucleotide
  Description of Combined DNA/RNA Molecule: Synthetic oligonucleotide
tuugaucuuagacggaguguu

SEQ ID NO: 645 - DNA, 21 bp, Artificial Sequence
  Description of Artificial Sequence: Synthetic oligonucleotide
  Description of Combined DNA/RNA Molecule: Synthetic oligonucleotide
ucucuguuguaauugucuctt

SEQ ID NO: 646 - DNA, 21 bp, Artificial Sequence
  Description of Artificial Sequence: Synthetic oligonucleotide
  Description of Combined DNA/RNA Molecule: Synthetic oligonucleotide
uguguugguugacccaaagtt

SEQ ID NO: 647 - DNA, 21 bp, Artificial Sequence
  Description of Artificial Sequence: Synthetic oligonucleotide
  Description of Combined DNA/RNA Molecule: Synthetic oligonucleotide
uggcuauugguguugguugtt

SEQ ID NO: 648 - DNA, 21 bp, Artificial Sequence
  Description of Artificial Sequence: Synthetic oligonucleotide
  Description of Combined DNA/RNA Molecule: Synthetic oligonucleotide
uagaaguacgggcagauggtt

SEQ ID NO: 649 - DNA, 21 bp, Artificial Sequence
  Description of Artificial Sequence: Synthetic oligonucleotide
  Description of Combined DNA/RNA Molecule: Synthetic oligonucleotide
agacaaaugacuuugguggtt

SEQ ID NO: 650 - DNA, 21 bp, Artificial Sequence
  Description of Artificial Sequence: Synthetic oligonucleotide
  Description of Combined DNA/RNA Molecule: Synthetic oligonucleotide
uccuaggugaauuuuugactt

SEQ ID NO: 651 - DNA, 21 bp, Artificial Sequence
  Description of Artificial Sequence: Synthetic oligonucleotide
  Description of Combined DNA/RNA Molecule: Synthetic oligonucleotide
uaguaucuaagauaaaucctt

SEQ ID NO: 652 - DNA, 21 bp, Artificial Sequence
  Description of Artificial Sequence: Synthetic oligonucleotide
  Description of Combined DNA/RNA Molecule: Synthetic oligonucleotide
aaguacaccaauuaguaugtt

SEQ ID NO: 653 - DNA, 21 bp, Artificial Sequence
  Description of Artificial Sequence: Synthetic oligonucleotide
  Description of Combined DNA/RNA Molecule: Synthetic oligonucleotide
uacaaugaugauuauagcutt

SEQ ID NO: 654 - DNA, 21 bp, Artificial Sequence
  Description of Artificial Sequence: Synthetic oligonucleotide
  Description of Combined DNA/RNA Molecule: Synthetic oligonucleotide
ucuugaucagaguugggagtt

SEQ ID NO: 655 - DNA, 21 bp, Artificial Sequence
  Description of Artificial Sequence: Synthetic oligonucleotide
  Description of Combined DNA/RNA Molecule: Synthetic oligonucleotide
aguguaauugaguauaucctt

SEQ ID NO: 656 - DNA, 21 bp, Artificial Sequence
  Description of Artificial Sequence: Synthetic oligonucleotide
  Description of Combined DNA/RNA Molecule: Synthetic oligonucleotide
uucugcauuuaucuugacctt

SEQ ID NO: 657 - DNA, 21 bp, Artificial Sequence
  Description of Artificial Sequence: Synthetic oligonucleotide
  Description of Combined DNA/RNA Molecule: Synthetic oligonucleotide
aaauaauacuagccuaccutt

SEQ ID NO: 658 - DNA, 21 bp, Artificial Sequence
  Description of Artificial Sequence: Synthetic oligonucleotide
  Description of Combined DNA/RNA Molecule: Synthetic oligonucleotide
ugaaaauucaagcuuggggtt

SEQ ID NO: 659 - DNA, 21 bp, Artificial Sequence
  Description of Artificial Sequence: Synthetic oligonucleotide
  Description of Combined DNA/RNA Molecule: Synthetic oligonucleotide
auucgcuuauggcuuaccctt

SEQ ID NO: 660 - DNA, 21 bp, Artificial Sequence
  Description of Artificial Sequence: Synthetic oligonucleotide
  Description of Combined DNA/RNA Molecule: Synthetic oligonucleotide
aauuaagauucgcuuauggtt

SEQ ID NO: 661 - DNA, 21 bp, Artificial Sequence
  Description of Artificial Sequence: Synthetic oligonucleotide
  Description of Combined DNA/RNA Molecule: Synthetic oligonucleotide
uucuauuagagauauggcatt

SEQ ID NO: 662 - DNA, 21 bp, Artificial Sequence
  Description of Artificial Sequence: Synthetic oligonucleotide
  Description of Combined DNA/RNA Molecule: Synthetic oligonucleotide
auuauacaagauucuaggctt

SEQ ID NO: 663 - DNA, 21 bp, Artificial Sequence
  Description of Artificial Sequence: Synthetic oligonucleotide
  Description of Combined DNA/RNA Molecule: Synthetic oligonucleotide
uauuauacaagauucuaggtt

SEQ ID NO: 664 - DNA, 21 bp, Artificial Sequence
  Description of Artificial Sequence: Synthetic oligonucleotide
  Description of Combined DNA/RNA Molecule: Synthetic oligonucleotide
aaaacuuuccuaugagagctt

SEQ ID NO: 665 - DNA, 21 bp, Artificial Sequence
  Description of Artificial Sequence: Synthetic oligonucleotide
  Description of Combined DNA/RNA Molecule: Synthetic oligonucleotide
ugagauacccuucugacagtt

SEQ ID NO: 666 - DNA, 21 bp, Artificial Sequence
  Description of Artificial Sequence: Synthetic oligonucleotide
  Description of Combined DNA/RNA Molecule: Synthetic oligonucleotide
ugauuugcagcucacguagtt

SEQ ID NO: 667 - DNA, 21 bp, Artificial Sequence
  Description of Artificial Sequence: Synthetic oligonucleotide
  Description of Combined DNA/RNA Molecule: Synthetic oligonucleotide
ugaauuaauggccaucacctt

SEQ ID NO: 668 - DNA, 21 bp, Artificial Sequence
  Description of Artificial Sequence: Synthetic oligonucleotide
  Description of Combined DNA/RNA Molecule: Synthetic oligonucleotide
aaacacgguguccauaaugtt

SEQ ID NO: 669 - DNA, 21 bp, Artificial Sequence
  Description of Artificial Sequence: Synthetic oligonucleotide
  Description of Combined DNA/RNA Molecule: Synthetic oligonucleotide
ugucaugaugaguucagactt

SEQ ID NO: 670 - DNA, 21 bp, Artificial Sequence
  Description of Artificial Sequence: Synthetic oligonucleotide
  Description of Combined DNA/RNA Molecule: Synthetic oligonucleotide
uucaguugacaucaauugctt

SEQ ID NO: 671 - DNA, 21 bp, Artificial Sequence
  Description of Artificial Sequence: Synthetic oligonucleotide
  Description of Combined DNA/RNA Molecule: Synthetic oligonucleotide
ucucuauggauuuacauugtt

SEQ ID NO: 672 - DNA, 21 bp, Artificial Sequence
  Description of Artificial Sequence: Synthetic oligonucleotide
  Description of Combined DNA/RNA Molecule: Synthetic oligonucleotide
uccuuauggcuccucuuactt

SEQ ID NO: 673 - DNA, 21 bp, Artificial Sequence
  Description of Artificial Sequence: Synthetic oligonucleotide
  Description of Combined DNA/RNA Molecule: Synthetic oligonucleotide
aaaacagaacgcugucggctt

SEQ ID NO: 674 - DNA, 21 bp, Artificial Sequence
  Description of Artificial Sequence: Synthetic oligonucleotide
  Description of Combined DNA/RNA Molecule: Synthetic oligonucleotide
uucgaagaaacgcuugcagtt

SEQ ID NO: 675 - DNA, 21 bp, Artificial Sequence
  Description of Artificial Sequence: Synthetic oligonucleotide
  Description of Combined DNA/RNA Molecule: Synthetic oligonucleotide
uauugggcaaaauccgggctt

SEQ ID NO: 676 - DNA, 21 bp, Artificial Sequence
  Description of Artificial Sequence: Synthetic oligonucleotide
  Description of Combined DNA/RNA Molecule: Synthetic oligonucleotide
uucuuauugggcaaaaucctt

SEQ ID NO: 677 - DNA, 21 bp, Artificial Sequence
  Description of Artificial Sequence: Synthetic oligonucleotide
  Description of Combined DNA/RNA Molecule: Synthetic oligonucleotide
uucgucucgguucuuauugtt

SEQ ID NO: 678 - DNA, 21 bp, Artificial Sequence
  Description of Artificial Sequence: Synthetic oligonucleotide
  Description of Combined DNA/RNA Molecule: Synthetic oligonucleotide
auucaguucgucucgguuctt

SEQ ID NO: 679 - DNA, 21 bp, Artificial Sequence
  Description of Artificial Sequence: Synthetic oligonucleotide
  Description of Combined DNA/RNA Molecule: Synthetic oligonucleotide
aaagccauucaguucgucutt

SEQ ID NO: 680 - DNA, 21 bp, Artificial Sequence
  Description of Artificial Sequence: Synthetic oligonucleotide
  Description of Combined DNA/RNA Molecule: Synthetic oligonucleotide
aagucuugcacgcccauggtt

SEQ ID NO: 681 - DNA, 21 bp, Artificial Sequence
  Description of Artificial Sequence: Synthetic oligonucleotide
  Description of Combined DNA/RNA Molecule: Synthetic oligonucleotide
augucaaagucuugcacgctt

SEQ ID NO: 682 - DNA, 21 bp, Artificial Sequence
  Description of Artificial Sequence: Synthetic oligonucleotide
  Description of Combined DNA/RNA Molecule: Synthetic oligonucleotide
taauccuuccgguuacucuuu

SEQ ID NO: 683 - DNA, 21 bp, Artificial Sequence
  Description of Artificial Sequence: Synthetic oligonucleotide
  Description of Combined DNA/RNA Molecule: Synthetic oligonucleotide
tuaauccuuccgguuacucuu

SEQ ID NO: 684 - DNA, 21 bp, Artificial Sequence
  Description of Artificial Sequence: Synthetic oligonucleotide
  Description of Combined DNA/RNA Molecule: Synthetic oligonucleotide
taguaauccuuccgguuacuu

SEQ ID NO: 685 - DNA, 21 bp, Artificial Sequence
  Description of Artificial Sequence: Synthetic oligonucleotide
  Description of Combined DNA/RNA Molecule: Synthetic oligonucleotide
tcagcgaguaauccuuccguu

SEQ ID NO: 686 - DNA, 21 bp, Artificial Sequence
  Description of Artificial Sequence: Synthetic oligonucleotide
  Description of Combined DNA/RNA Molecule: Synthetic oligonucleotide
tucagcgaguaauccuuccuu

SEQ ID NO: 687 - DNA, 21 bp, Artificial Sequence
  Description of Artificial Sequence: Synthetic oligonucleotide
  Description of Combined DNA/RNA Molecule: Synthetic oligonucleotide
taucgucagcgaguaauccuu

SEQ ID NO: 688 - DNA, 21 bp, Artificial Sequence
  Description of Artificial Sequence: Synthetic oligonucleotide
  Description of Combined DNA/RNA Molecule: Synthetic oligonucleotide
tacaugcccucuugcacgguu

SEQ ID NO: 689 - DNA, 21 bp, Artificial Sequence
  Description of Artificial Sequence: Synthetic oligonucleotide
  Description of Combined DNA/RNA Molecule: Synthetic oligonucleotide
tuauaucauucccugcccguu

SEQ ID NO: 690 - DNA, 21 bp, Artificial Sequence
  Description of Artificial Sequence: Synthetic oligonucleotide
  Description of Combined DNA/RNA Molecule: Synthetic oligonucleotide
tgcuuauaucauucccugcuu

SEQ ID NO: 691 - DNA, 21 bp, Artificial Sequence
  Description of Artificial Sequence: Synthetic oligonucleotide
  Description of Combined DNA/RNA Molecule: Synthetic oligonucleotide
tuccagcuuauaucauuccuu

SEQ ID NO: 692 - DNA, 21 bp, Artificial Sequence
  Description of Artificial Sequence: Synthetic oligonucleotide
  Description of Combined DNA/RNA Molecule: Synthetic oligonucleotide
ugauaauccaucuuguucctt

SEQ ID NO: 693 - DNA, 21 bp, Artificial Sequence
  Description of Artificial Sequence: Synthetic oligonucleotide
  Description of Combined DNA/RNA Molecule: Synthetic oligonucleotide
auugauacugacuguauggtt

SEQ ID NO: 694 - DNA, 21 bp, Artificial Sequence
  Description of Artificial Sequence: Synthetic oligonucleotide
  Description of Combined DNA/RNA Molecule: Synthetic oligonucleotide
aagaugacuaucuuuaaugtt

SEQ ID NO: 695 - DNA, 21 bp, Artificial Sequence
  Description of Artificial Sequence: Synthetic oligonucleotide
  Description of Combined DNA/RNA Molecule: Synthetic oligonucleotide
aaacuuauuaaccauaccutt

SEQ ID NO: 696 - DNA, 21 bp, Artificial Sequence
  Description of Artificial Sequence: Synthetic oligonucleotide
  Description of Combined DNA/RNA Molecule: Synthetic oligonucleotide
ugcaacaccaaccaggauctt

SEQ ID NO: 697 - DNA, 21 bp, Artificial Sequence
  Description of Artificial Sequence: Synthetic oligonucleotide
  Description of Combined DNA/RNA Molecule: Synthetic oligonucleotide
auguuccuagaccucauactt

SEQ ID NO: 698 - DNA, 21 bp, Artificial Sequence
  Description of Artificial Sequence: Synthetic oligonucleotide
  Description of Combined DNA/RNA Molecule: Synthetic oligonucleotide
aguaacuaagaguuugaugtt

SEQ ID NO: 699 - DNA, 21 bp, Artificial Sequence
  Description of Artificial Sequence: Synthetic oligonucleotide
  Description of Combined DNA/RNA Molecule: Synthetic oligonucleotide
uucagucugaaauacggagtt

SEQ ID NO: 700 - DNA, 21 bp, Artificial Sequence
  Description of Artificial Sequence: Synthetic oligonucleotide
  Description of Combined DNA/RNA Molecule: Synthetic oligonucleotide
aacagucucaaguaugugctt

SEQ ID NO: 701 - DNA, 21 bp, Artificial Sequence
  Description of Artificial Sequence: Synthetic oligonucleotide
  Description of Combined DNA/RNA Molecule: Synthetic oligonucleotide
agacauuucccuucguugctt

SEQ ID NO: 702 - DNA, 21 bp, Artificial Sequence
  Description of Artificial Sequence: Synthetic oligonucleotide
  Description of Combined DNA/RNA Molecule: Synthetic oligonucleotide
uguauauggccacgccgugtt

SEQ ID NO: 703 - DNA, 21 bp, Artificial Sequence
  Description of Artificial Sequence: Synthetic oligonucleotide
  Description of Combined DNA/RNA Molecule: Synthetic oligonucleotide
ugcuuuaugagguaucccctt

SEQ ID NO: 704 - DNA, 21 bp, Artificial Sequence
  Description of Artificial Sequence: Synthetic oligonucleotide
  Description of Combined DNA/RNA Molecule: Synthetic oligonucleotide
acuuaugaccguuugcuugtt

SEQ ID NO: 705 - DNA, 21 bp, Artificial Sequence
  Description of Artificial Sequence: Synthetic oligonucleotide
  Description of Combined DNA/RNA Molecule: Synthetic oligonucleotide
uugacuugauaguacacaatt

SEQ ID NO: 706 - DNA, 21 bp, Artificial Sequence
  Description of Artificial Sequence: Synthetic oligonucleotide
  Description of Combined DNA/RNA Molecule: Synthetic oligonucleotide
aaacaugaaucgcagauggtt

SEQ ID NO: 707 - DNA, 21 bp, Artificial Sequence
  Description of Artificial Sequence: Synthetic oligonucleotide
  Description of Combined DNA/RNA Molecule: Synthetic oligonucleotide
uggaauccaucguguagagtt

SEQ ID NO: 708 - DNA, 21 bp, Artificial Sequence
  Description of Artificial Sequence: Synthetic oligonucleotide
  Description of Combined DNA/RNA Molecule: Synthetic oligonucleotide
auuuccggucugcaaugagtt

SEQ ID NO: 709 - DNA, 21 bp, Artificial Sequence
  Description of Artificial Sequence: Synthetic oligonucleotide
  Description of Combined DNA/RNA Molecule: Synthetic oligonucleotide
aaaugcugaaauuuccggutt

SEQ ID NO: 710 - DNA, 21 bp, Artificial Sequence
  Description of Artificial Sequence: Synthetic oligonucleotide
  Description of Combined DNA/RNA Molecule: Synthetic oligonucleotide
gaaaauaauguccucgacctt

SEQ ID NO: 711 - DNA, 21 bp, Artificial Sequence
  Description of Artificial Sequence: Synthetic oligonucleotide
  Description of Combined DNA/RNA Molecule: Synthetic oligonucleotide
ucgaaguacucagcguaagtt

SEQ ID NO: 712 - protein, 119 aa, Artificial Sequence
  Description of Artificial Sequence: Synthetic polypeptide
EVQLQQSGPDLVKPGALVKISCKASGYSFTAYYIHWVKQSHGKSLEWIGRVNPNTGGTSYNPKFKGKAILNVDKSSSTAYMELRSLTSEDSAVYYCARSGSPYYRYDDWGQGTTLTVSS

SEQ ID NO: 713 - protein, 108 aa, Artificial Sequence
  Description of Artificial Sequence: Synthetic polypeptide
ENVLTQSPAIMSASPGEKVTMTCRASSTVNSTYLHWFQQKSGASPKLWIYGSSNLASGVPARFSGSGSGTSYSLTISSVEAEDAATYYCQQYSGYPLTFGAGTTLELK

SEQ ID NO: 714 - protein, 120 aa, Artificial Sequence
  Description of Artificial Sequence: Synthetic polypeptide
EVQLVETGGGLVQPKGSLKLSCAASGFTFNTNAMNWVRQAPGKGLEWVARIRSKSNNYATYYADSVKDRFTISRDDTQSMIYLQMNNLKTEDTGMYYCVRGGSYWYFDVWGAGTTVTVSS

SEQ ID NO: 715 - protein, 112 aa, Artificial Sequence
  Description of Artificial Sequence: Synthetic polypeptide
DVLMTQTPLSLPVSLGDQASISCRSSQSIVNSNGNTYLEWYLQKPGQSPKLLIYKVSNRFSGVPDRFSGSGSGTDFTLKISRVEAEDLGVYYCFQGSHVPWTFGGGTKLEIK

SEQ ID NO: 716 - protein, 120 aa, Artificial Sequence
  Description of Artificial Sequence: Synthetic polypeptide
EVQLVESGGGLVQPGGSLRLSCAASGFTFSSFGMHWVRQAPGKGLEWVAYINGGSSTIFYANAVKGRFTISRDNAKNTLYLQMNSLRAEDTAVYYCARYASYGGGAMDYWGQGTLVTVSS

SEQ ID NO: 717 - protein, 112 aa, Artificial Sequence
  Description of Artificial Sequence: Synthetic polypeptide
DIQMTQSPSSLSASVGDRVTITCRSSQSIVHNDGNTYFEWYQQKPGKAPKLLIYKVSNRFSGVPSRFSGSGSGTHFTLTISSLQPEDFATYYCFQGSYVPLTFGQGTKVEIK

SEQ ID NO: 718 - protein, 121 aa, Artificial Sequence
  Description of Artificial Sequence: Synthetic polypeptide
QVQLQQSGPGLVKPSQTLSLTCAISGDSVSSNIAAWHWIRLSPSRGLEWLGRTYYRRSKWNYDYALSVKSRININPDTSKNLFSLQLNSVTPEDTAVYYCTRGGGRAHSAWGQGTLVTVSS

SEQ ID NO: 719 - protein, 108 aa, Artificial Sequence
  Description of Artificial Sequence: Synthetic polypeptide
EIVLTQSPGTLSVSPGERATLSCRASQSVSRSHLAWYQQKPGQAPRLLIFGASSRATGIPDRFSGSGSGTDFTLTISRLEPEDFAVYYCQQYGRPGVTFGQGTKVEIK

SEQ ID NO: 720 - protein, 119 aa, Artificial Sequence
  Description of Artificial Sequence: Synthetic polypeptide
QVQLVQSGAEVKKPGSSVRVSCKASGGSFSSYGIHWVQQAPGQGLEWMGRIIPVLRIRNYAQKFHDRVTIDADTSTGTAYMELSSLTSDDTAVYYCAGSRQGVAPTGYWGQGTMVTVSS

SEQ ID NO: 721 - protein, 115 aa, Artificial Sequence
  Description of Artificial Sequence: Synthetic polypeptide
QAVLTQPSSLSASPGASASLTCNLRSGIDVGTYRIYWYQQKPGSPPQYLLRYKSDSDKQQGSGVPSRFSGTKDASANAGILLISGLQSEDEADYYCMIWHSNGWVFGGGTKLTVL

SEQ ID NO: 722 - protein, 115 aa, Artificial Sequence
  Description of Artificial Sequence: Synthetic polypeptide
EVQLLESGGGLVRPGGSLRLSCAASGFTFSSYAMSWVRQAPGKGLEWVSAISGSGGSTYYADSVKGRFTISRDNSKNTLYLQMNSLRAEDTAVYYCARDKRLTYWGQGTMVTVSS

SEQ ID NO: 723 - protein, 110 aa, Artificial Sequence
  Description of Artificial Sequence: Synthetic polypeptide
QSVVTQPPSVSAAPGQKVTISCSGSSSNIGNNYVSWYQQLPGTAPKLLIYDNNKRPSGIPDRFSGSKSGTSATLGITGLQTGDEADYYCGTWDSSLSARVFGGGTKVTVL

SEQ ID NO: 724 - protein, 120 aa, Artificial Sequence
  Description of Artificial Sequence: Synthetic polypeptide
EVQLQQSGPELVKPGASVKMSCKASGYTFTSYVMHWMKQKPGQGLEWIGYINPYNDGTKYNDKFKGKATLTSDKSSSTAYMELSSLTSEDSAVYYCARGSNYEDFAMDYRGQGTSVTVSS

SEQ ID NO: 725 - protein, 107 aa, Artificial Sequence
  Description of Artificial Sequence: Synthetic polypeptide
DIVMTQSPASQSASLGESVTITCLASQTIGTWLAWYQQKPGKSPQLLIYAATTLADGVPSRFSGSGSGTKFSFKISSLQAEDFVSYYCQQLYSTPLTFGGGTKVEIK

SEQ ID NO: 726 - protein, 117 aa, Artificial Sequence
  Description of Artificial Sequence: Synthetic polypeptide
EVQLQQSGPELVKPGASVKVSCKASGYAFTSYNMYWVKQSHGKSLEWIGYIDPYNGGTRHNQKFKDKATLTVDKSSSTAYMHLNSLTSEDSAVYYCASQNYEYFDYWGQGTTLTVSS

SEQ ID NO: 727 - protein, 107 aa, Artificial Sequence
  Description of Artificial Sequence: Synthetic polypeptide
DIVLTQSPKFMSTSVGDRVSITCKASQDVGDAVAWYQQKPGQSPKLLFYWTSTRHTGVPDRFTGSGSGTEFTLTIRNVQSEDLADYFCQQYRSTPLTFGSGTKVEIK

SEQ ID NO: 728 - protein, 327 aa, Artificial Sequence
  Description of Artificial Sequence: Synthetic polypeptide
ASTKGPSVFPLAPCSRSTSESTAALGCLVKDYFPEPVTVSWNSGALTSGVHTFPAVLQSSGLYSLSSVVTVPSSSLGTKTYTCNVDHKPSNTKVDKRVESKYGPPCPPCPAPEFLGGPSVFLFPPKPKDTLMISRTPEVTCVVVDVSQEDPEVQFNWYVDGVEVHNAKTKPREEQFNSTYRVVSVLTVLHQDWLNGKEYKCKVSNKGLPSSIEKTISKAKGQPREPQVYTLPPSQEEMTKNQVSLTCLVKGFYPSDIAVEWESNGQPENNYKTTPPVLDSDGSFFLYSRLTVDKSRWQEGNVFSCSVMHEALHNHYTQKSLSLSLGK

SEQ ID NO: 729 - protein, 107 aa, Artificial Sequence [sequence omitted]

SEQ ID NO: 730 - protein, 106 aa, Artificial Sequence
  Description of Artificial Sequence: Synthetic polypeptide
GQPKAAPSVTLFPPSSEELQANKATLVCLISDFYPGAVTVAWKADSSPVKAGVETTTPSKQSNNKYAASSYLSLTPEQWKSHRSYSCQVTHEGSTVEKTVAPTECS

What is claimed is:

1. A method of generating monocytes and/or macrophages having an increased inflammatory phenotype after contact with at least one agent comprising contacting monocytes and/or macrophages with an effective amount of the at least one agent, wherein the at least one agent is a) an agent that downregulates the copy number, amount, and/or activity of at least one target listed in Table 1 and/or b) an agent that upregulates the copy number, amount, and/or activity of at least one target listed in Table 2.

2. The method of claim 1, wherein the monocytes and/or macrophages having an increased inflammatory phenotype exhibit one or more of the following after contact with the agent or agents:
a) increased expression and/or secretion of cluster of differentiation 80 (CD80), CD86, MHCII, MHCI, interleukin 1-beta (IL-1β), IL-6, CCL3, CCL4, CXCL10, CXCL9, GM-CSF and/or tumor necrosis factor alpha (TNF-α);
b) decreased expression and/or secretion of CD206, CD163, CD16, CD53, VSIG4, PSGL-1, TGFb and/or IL-10;
c) increased secretion of at least one cytokine or chemokine selected from the group consisting of IL-1β, TNF-α, IL-12, IL-18, GM-CSF, CCL3, CCL4, and IL-23;
d) increased ratio of expression of IL-1$, IL-6, and/or TNF-α to expression of IL-10;
e) increased CD8+ cytotoxic T cell activation;
f) increased recruitment of CD8+ cytotoxic T cell activation;
g) increased CD4+ helper T cell activity;
h) increased recruitment of CD4+ helper T cell activity;
i) increased NK cell activity;
j) increased recruitment of NK cell;
k) increased neutrophil activity;
l) increased macrophage activity; and/or
m) increased spindle-shaped morphology, flatness of appearance, and/or number of dendrites, as assessed by microscopy.

3. The method of claim 1 or 2, wherein the monocytes and/or macrophages contacted with the agent or agents are comprised within a population of cells and the agent increase the number of Type 1 and/or M1 macrophages, and/or decrease the number of Type 2 and/or M2 macrophages, in the population of cells.

4. The method of any one of claims 1-3, wherein the monocytes and/or macrophages contacted with the agent or agents are comprised within a population of cells and the agent or agents increases the ratio of i) to ii), wherein i) is Type 1 and/or M1 macrophages and ii) is Type 2 and/or M2 macrophages in the population of cells.

5. A method of generating monocytes and/or macrophages having a decreased inflammatory phenotype after contact with at least one agent comprising contacting monocytes and/or macrophages with an effective amount of the at least one agent, wherein the agent is a) an agent that upregulates the copy number, amount, and/or activity of at least one target listed in Table 1 and/or b) an agent that downregulates the copy number, amount, and/or activity of at least one target listed in Table 2.

6. The method of claim 5, wherein the monocytes and/or macrophages having the decreased inflammatory phenotype exhibit one or more of the following after contact with the agent or agents:
a) decreased expression and/or secretion of cluster of differentiation 80 (CD80), CD86, MHCII, MHCI, interleukin 1-beta (IL-1β), IL-6, CCL3, CCL4, CXCL10, CXCL9, GM-CSF and/or tumor necrosis factor alpha (TNF-α);
b) increased expression and/or secretion of CD206, CD163, CD16, CD53, VSIG4, PSGL-1 and/or IL-10;
c) decreased secretion of at least one cytokine selected from the group consisting of IL-1β, TNF-α, IL-12, IL-18, and IL-23;
d) decreased ratio of expression of IL-1β, IL-6, and/or TNF-α to expression of IL-10;
e) decreased CD8+ cytotoxic T cell activation;
f) decreased CD4+ helper T cell activity;
g) decreased NK cell activity;
h) decreased pro-inflammatory neutrophil activity,
i) decreased macrophage activity; and/or
j) decreased spindle-shaped morphology, flatness of appearance, and/or number of dendrites, as assessed by microscopy.

7. The method of claim 5 or 6, wherein the monocytes and/or macrophages contacted with the agent or agents are comprised within a population of cells and the agent decrease the number of Type 1 and/or M1 macrophages, and/or increase the number of Type 2 and/or M2 macrophages, in the population of cells.

8. The method of any one of claims 5-7, wherein the monocytes and/or macrophages contacted with the agent or agents are comprised within a population of cells and the agent or agents decrease the ratio of i) to ii), wherein i) is Type 1 and/or M1 macrophages and ii) is Type 2 and/or M2 macrophages in the population of cells.

9. The method of any one of claims 1-8, wherein the agent or agents that downregulate the copy number, amount, and/or activity of at least one target listed in Table 1 and/or Table 2 is a small molecule inhibitor, CRISPR guide RNA (gRNA), RNA interfering agent, antisense oligonucleotide, single-stranded nucleic acid, double-stranded nucleic acid, aptamer, ribozyme, DNAzyme, peptide, peptidomimetic, antibody, intrabody, or cells.

10. The method of claim 9, wherein the RNA interfering agent is a small interfering RNA (siRNA), a small hairpin RNA (shRNA), microRNA (miRNA), or a piwi-interacting RNA (piRNA).

11. The method of any one of claims 1-8, wherein the agent or agents that downregulate the copy number, amount, and/or activity of at least one target listed in Table 1 and/or Table 2 comprises an antibody and/or intrabody, or an antigen binding fragment thereof, which specifically binds to the at least one target listed in Table 1 and/or Table 2.

12. The method of claim 11, wherein the antibody and/or intrabody, or antigen binding fragment thereof, is camelid, murine, chimeric, humanized, human, detectably labeled, comprises an effector domain, comprises an Fc domain, and/or is selected from the group consisting of Fv, Fav, F(ab′)2, Fab′, dsFv, scFv, sc(Fv)2, and diabodies fragments.

13. The method of claim 11 or 12, wherein the antibody and/or intrabody, or antigen binding fragment thereof, is conjugated to a cytotoxic agent.

14. The method of claim 13, wherein the cytotoxic agent is selected from the group consisting of a chemotherapeutic agent, a biologic agent, a toxin, and a radioactive isotope.

15. The method of any one of claims 1-8, wherein the agent or agents that upregulate the copy number, amount, and/or activity of at least one target listed in Table 1 and/or Table 2 is a nucleic acid molecule encoding the one or more targets listed in Table 1 and/or Table 2 or fragment thereof, a polypeptide of the one or more targets listed in Table 1 and/or Table 2 or fragment(s) thereof, an activating antibody and/or intrabody that binds to the one or more targets listed in Table 1 and/or Table 2, or a small molecule that binds to the one or more targets listed in Table 1 and/or Table 2.

16. The method of any one of claims 1-15, wherein the macrophages comprise Type 1 macrophages, M1 macrophages, Type 2 macrophages, M2 macrophages, M2c macrophages, M2d macrophages, tumor-associated macrophages (TAM), CD11b+ cells, CD14+ cells, and/or CD11b+/CD14+ cells, optionally wherein the cells and/or macrophages express the target.

17. The method of any one of claims 1-16, wherein the monocytes and/or macrophages are contacted in vitro or ex vivo.

18. The method of claim 17, wherein the monocytes and/or macrophages are primary monocytes and/or primary macrophages.

19. The method of claim 17 or 18, wherein the monocytes and/or macrophages are purified and/or cultured prior to contact with the agent or agents.

20. The method of any one of claims 1-16, wherein the monocytes and/or macrophages are contacted in vivo.

21. The method of claim 20, wherein the monocytes and/or macrophages are contacted in vivo by systemic, peritumoral, or intratumoral administration of the agent.

22. The method of claim 20 or 21, wherein the monocytes and/or macrophages are contacted in a tissue microenvironment.

23. The method of any one of claims 1-22, further comprising contacting the monocytes and/or macrophages with at least one immunotherapeutic agent that modulates the inflammatory phenotype, optionally wherein the immunotherapeutic agent comprises an immune checkpoint inhibitor, immune-stimulatory agonist, inflammatory agent, cells, a cancer vaccine, and/or a virus.

24. A composition comprising i) a monocyte and/or macrophage generated according to a method of any one of claims 1-23 and/or ii) an siRNA for downregulating the amount and/or activity of at least one target listed in Table 1 and/or Table 2.

25. A method of increasing an inflammatory phenotype of monocytes and/or macrophages in a subject after contact with at least one agent comprising administering to the subject an effective amount of the at least one agent, wherein the at least one agent is a) an agent that downregulates the copy number, amount, and/or activity of at least one target listed in Table 1 in or on the monocytes and/or macrophages, and/or b) an agent that upregulates the copy number, amount, and/or activity of at least one target listed in Table 2 in or on the monocytes and/or macrophages.

26. The method of claim 25, wherein the monocytes and/or macrophages having the increased inflammatory phenotype exhibit one or more of the following after contact with the agent or agents:
a) increased expression and/or secretion of cluster of differentiation 80 (CD80), CD86, MHCII, MHCI, interleukin 1-beta (IL-1β), IL-6, CCL3, CCL4, CXCL10, CXCL9, GM-CSF and/or tumor necrosis factor alpha (TNF-α);
b) decreased expression and/or secretion of CD206, CD163, CD16, CD53, VSIG4, PSGL-1 and/or IL-10;
c) increased secretion of at least one cytokine selected from the group consisting of IL-1β, TNF-α, IL-12, IL-18, and IL-23;
d) increased ratio of expression of IL-1β, IL-6, and/or TNF-α to expression of IL-10;
e) increased CD8+ cytotoxic T cell activation;
f) increased CD4+ helper T cell activity;
g) increased NK cell activity;
h) increased neutrophil activity;
i) increased macrophage activity; and/or
j) increased spindle-shaped morphology, flatness of appearance, and/or number of dendrites, as assessed by microscopy.

27. The method of claim 25 or 26, wherein the agent or agents increase the number of Type 1 and/or M1 macrophages, decrease the number of Type 2 and/or M2 macrophages, and/or increase the ratio of i) to ii), wherein i) is Type 1 and/or M1 macrophages and ii) is Type 2 and/or M2 macrophages, in the subject.

28. The method of any one of claims 25-27, wherein the number and/or activity of cytotoxic CD8+ T cells in the subject is increased after administration of the agent or agents.

29. A method of decreasing an inflammatory phenotype of monocytes and/or macrophages in a subject after contact with at least one agent comprising administering to the subject an effective amount of the at least one agent, wherein the at least one agent is a) an agent that upregulates the copy number, amount, and/or activity of at least one target listed in Table 1 in or on the monocytes and/or macrophages, and/or b) an agent that downregulates the copy number, amount, and/or activity of at least one target listed in Table 2 in or on the monocytes and/or macrophages.

30. The method of claim 29, wherein the monocytes and/or macrophages having the decreased inflammatory phenotype exhibit one or more of the following after contact with the agent or agents:
a) decreased expression and/or secretion of cluster of differentiation 80 (CD80), CD86, MHCII, MHCI, interleukin 1-beta (IL-1β), IL-6, CCL3, CCL4, CXCL10, CXCL9, GM-CSF and/or tumor necrosis factor alpha (TNF-α);
b) increased expression and/or secretion of CD206, CD163, CD16, CD53, VSIG4, PSGL-1 and/or IL-10;
c) decreased secretion of at least one cytokine selected from the group consisting of IL-1s, TNF-α, IL-12, IL-18, and IL-23;
d) decreased ratio of expression of IL-1β, IL-6, and/or TNF-α to expression of IL-10;
e) decreased CD8+ cytotoxic T cell activation;
f) decreased CD4+ helper T cell activity;
g) decreased NK cell activity;
h) decreased neutrophil activity;
i) decreased macrophage activity; and/or
j) decreased spindle-shaped morphology, flatness of appearance, and/or number of dendrites, as assessed by microscopy.

31. The method of claim 29 or 30, wherein the agent or agents decrease the number of Type 1 and/or M1 macrophages, increase the number of Type 2 and/or M2 macrophages, and/or decrease the ratio of i) to ii), wherein i) is Type 1 and/or M1 macrophages and ii) is Type 2 and/or M2 macrophages, in the subject.

32. The method of any one of claims 29-31, wherein the number and/or activity of cytotoxic CD8+ T cells in the subject is decreased after administration of the agent.

33. The method of any one of claims 25-32, wherein the agent that downregulates the copy number, amount, and/or activity of at least one target listed in Table 1 and/or Table 2 is a small molecule inhibitor, CRISPR guide RNA (gRNA), RNA interfering agent, antisense oligonucleotide, peptide or peptidomimetic inhibitor, aptamer, antibody, intrabody, or cells.

34. The method of claim 33, wherein the RNA interfering agent is a small interfering RNA (siRNA), a small hairpin RNA (shRNA), microRNA (miRNA), or a piwi-interacting RNA (piRNA).

35. The method of any one of claims 25-32, wherein the agent that downregulates the copy number, amount, and/or activity of at least one target listed in Table 1 and/or Table 2 comprises an antibody and/or intrabody, or an antigen binding fragment thereof, which specifically binds to the at least one target listed in Table 1 and/or Table 2.

36. The method of claim 35, wherein the antibody and/or intrabody, or antigen binding fragment thereof, is camelid, murine, chimeric, humanized, human, detectably labeled, comprises an effector domain, comprises an Fc domain, and/or is selected from the group consisting of Fv, Fav, F(ab′)2, Fab′, dsFv, scFv, sc(Fv)2, and diabodies fragments.

37. The method of claim 35 or 36, wherein the antibody and/or intrabody, or antigen binding fragment thereof, is conjugated to a cytotoxic agent.

38. The method of claim 37, wherein the cytotoxic agent is selected from the group consisting of a chemotherapeutic agent, a biologic agent, a toxin, and a radioactive isotope.

39. The method of any one of claims 25-32, wherein the agent that upregulates the copy number, amount, and/or activity of at least one target listed in Table 1 and/or Table 2 is a nucleic acid molecule encoding the one or more targets listed in Table 1 and/or Table 2 or fragment thereof, a polypeptide of the one or more targets listed in Table 1 and/or Table 2 or fragment(s) thereof, an activating antibody and/or intrabody that binds to the one or more targets listed in Table 1 and/or Table 2, or a small molecule that binds to the one or more targets listed in Table 1 and/or Table 2.

40. The method of any one of claims 25-39, wherein the macrophages comprise Type 1 macrophages, M1 macrophages, Type 2 macrophages, M2 macrophages, M2c macrophages, M2d macrophages, tumor-associated macrophages (TAM), CD11b+ cells, CD14+ cells, and/or CD11b+/CD14+ cells, optionally wherein the cells and/or macrophages express the target.

41. The method of claim 40, wherein the agent or agents are administered in vivo by systemic, peritumoral, or intratumoral administration of the agent.

42. The method of claim 40 or 41, wherein the agent or agents contact the monocytes and/or macrophages in a tissue microenvironment.

43. The method of any one of claims 25-42, further comprising contacting the monocytes and/or macrophages with at least one immunotherapeutic agent that modulates the inflammatory phenotype, optionally wherein the immunotherapeutic agent comprises an immune checkpoint inhibitor, immune-stimulatory agonist, inflammatory agent, cells, a cancer vaccine, and/or a virus.

44. A method of increasing inflammation in a subject comprising administering to the subject an effective amount of a) monocytes and/or macrophages contacted with at least one agent to downregulate the copy number, amount, and/or activity of at least one target listed in Table 1 and/or b) monocytes and/or macrophages contacted with at least one agent to upregulate the copy number, amount, and/or activity of at least one target listed in Table 2.

45. The method of claim 44, wherein the macrophages comprise Type 1 macrophages, M1 macrophages, Type 2 macrophages, M2 macrophages, M2c macrophages, M2d macrophages, tumor-associated macrophages (TAM), CD11b+ cells, CD14+ cells, and/or CD11b+/CD14+ cells, optionally wherein the cells and/or macrophages express the target.

46. The method of claim 44 or 45 wherein the monocytes and/or macrophages are genetically engineered, autologous, syngeneic, or allogeneic relative to the subject's monocytes and/or macrophages.

47. The method of any one of claims 44-46, wherein the monocytes and/or macrophages contacted with the at least one agent of a) are different from the monocytes and/or macrophages contacted with the at least one agent of b).

48. The method of any one of claims 44-46, wherein the monocytes and/or macrophages contacted with the at least one agent of a) are the same as the monocytes and/or macrophages contacted with the at least one agent of b).

49. The method of any one of claims 44-48, wherein the agent or agents are administered systemically, peritumorally, or intratumorally.

50. A method of decreasing inflammation in a subject comprising administering to the subject an effective amount of a) monocytes and/or macrophages contacted with at least one agent to upregulate the copy number, amount, and/or activity of at least one target listed in Table 1 and/or b) monocytes and/or macrophages contacted with at least one agent to downregulate the copy number, amount, and/or activity of at least one target listed in Table 2.

51. The method of claim 50, wherein the macrophages comprise Type 1 macrophages, M1 macrophages, Type 2 macrophages, M2 macrophages, M2c macrophages, M2d macrophages, tumor-associated macrophages (TAM), CD11b+ cells, CD14+ cells, and/or CD11b+/CD14+ cells, optionally wherein the cells and/or macrophages express the target.

52. The method of claim 50 or 51, wherein the monocytes and/or macrophages are genetically engineered, autologous, syngeneic, or allogeneic relative to the subject's monocytes and/or macrophages.

53. The method of any one of claims 50-52, wherein the monocytes and/or macrophages contacted with the at least one agent of a) are different from the monocytes and/or macrophages contacted with the at least one agent of b).

54. The method of any one of claims 50-52, wherein the monocytes and/or macrophages contacted with the at least one agent of a) are the same as the monocytes and/or macrophages contacted with the at least one agent of b).

55. The method of any one of claims 50-54, wherein the agent or agents are administered systemically, peritumorally, or intratumorally.

56. A method of sensitizing cancer cells in a subject to cytotoxic CD8+ T cell-mediated killing and/or immune checkpoint therapy comprising administering to the subject a therapeutically effective amount of a) at least one agent that downregulates the copy number, amount, and/or activity of at least one target listed in Table 1 in or on monocytes and/or macrophages and/or b) at least one agent that upregulates the copy number, amount, and/or activity of at least one target listed in Table 2 in or on monocytes and/or macrophages.

57. The method of claim 56, comprising administering at least one agent that downregulates the copy number, amount, and/or activity of at least one target listed in Table 1.

58. The method of claim 57, wherein the agent is a small molecule inhibitor, CRISPR guide RNA (gRNA), RNA interfering agent, antisense oligonucleotide, peptide or peptidomimetic inhibitor, aptamer, antibody, intrabody, or cells.

59. The method of claim 58, wherein the RNA interfering agent is a small interfering RNA (siRNA), a small hairpin RNA (shRNA), microRNA (miRNA), or a piwi-interacting RNA (piRNA).

60. The method of claim 58, wherein the agent comprises an antibody and/or intrabody, or an antigen binding fragment thereof, which specifically binds to the at least one target listed in Table 1.

61. The method of claim 60, wherein the antibody and/or intrabody, or antigen binding fragment thereof, is camelid, murine, chimeric, humanized, human, detectably labeled, comprises an effector domain, comprises an Fc domain, and/or is selected from the group consisting of Fv, Fav, F(ab′)2, Fab′, dsFv, scFv, sc(Fv)2, and diabodies fragments.

62. The method of claim 60 or 61, wherein the antibody and/or intrabody, or antigen binding fragment thereof, is conjugated to a cytotoxic agent.

63. The method of claim 62, wherein the cytotoxic agent is selected from the group consisting of a chemotherapeutic agent, a biologic agent, a toxin, and a radioactive isotope.

64. The method of claim 56, comprising administering at least one agent that upregulates the copy number, amount, and/or activity of at least one target listed in Table 2.

65. The method of claim 64, wherein the agent is a nucleic acid molecule encoding the one or more targets listed in Table 2 or fragment thereof, a polypeptide of the one or more targets listed in Table 2 or fragment(s) thereof, an activating antibody and/or intrabody that binds to the one or more targets listed in Table 2, or a small molecule that binds to the one or more targets listed in Table 2.

66. A method of sensitizing cancer cells in a subject afflicted with a cancer to cytotoxic CD8+ T cell-mediated killing and/or immune checkpoint therapy comprising administering to the subject a therapeutically effective amount of a) monocyte cells and/or macrophage cells contacted with at least one agent to downregulate the copy number, amount, and/or activity of at least one target listed in Table 1 and/or b) monocyte cells and/or macrophage cells contacted with at least one agent to upregulate the copy number, amount, and/or activity of at least one target listed in Table 2.

67. The method of claim 66, wherein the macrophages comprise Type 1 macrophages, M1 macrophages, Type 2 macrophages, M2 macrophages, M2c macrophages, M2d macrophages, tumor-associated macrophages (TAM), CD11b+ cells, CD14+ cells, and/or CD11b+/CD14+ cells, optionally wherein the cells and/or macrophages express the target.

68. The method of claim 66 or 67 wherein the monocytes and/or macrophages are genetically engineered, autologous, syngeneic, or allogeneic relative to the subject's monocytes and/or macrophages.

69. The method of any one of claims 66-68, wherein the monocytes and/or macrophages contacted with the at least one agent of a) are different from the monocytes and/or macrophages contacted with the at least one agent of b).

70. The method of any one of claims 66-68, wherein the monocytes and/or macrophages contacted with the at least one agent of a) are the same as the monocytes and/or macrophages contacted with the at least one agent of b).

71. The method of any one of claims 56-70, wherein the agent or agents are administered systemically, peritumorally, or intratumorally.

72. The method of any one of claims 56-71, further comprising treating the cancer in the subject by administering to the subject at least one immunotherapy, optionally wherein the immunotherapy comprises an immune checkpoint inhibitor, immune-stimulatory agonist, inflammatory agent, cells, a cancer vaccine, and/or a virus.

73. The method of claim 72, wherein the immune checkpoint is selected from the group consisting of PD-1, PD-L1, PD-L2, and CTLA-4.

74. The method of claim 73, wherein the immune checkpoint is PD-1.

75. The method of any one of claims 56-74, wherein the agent or agents reduce the number of proliferating cells in the cancer and/or reduce the volume or size of a tumor comprising the cancer cells.

76. The method of any one of claims 56-75, wherein the agent or agents increase the amount and/or activity of CD8+ T cells infiltrating a tumor comprising the cancer cells.

77. The method of any one of claims 56-76, wherein the agent or agents a) increase the amount and/or activity of M1 macrophages infiltrating a tumor comprising the cancer cells and/or b) decrease the amount and/or activity of M2 macrophages infiltrating a tumor comprising the cancer cells.

78. The method of any one of claims 56-77, further comprising administering to the subject at least one additional therapy or regimen for treating the cancer.

79. The method of any one of claims 51-63, wherein the therapy is administered before, concurrently with, or after the agent.

80. A method of identifying monocytes and/or macrophages that can increase an inflammatory phenotype thereof by modulating at least one target comprising:
a) determining the copy number, amount, and/or activity of at least one target listed in Table 1 and/or Table 2 from the monocytes and/or macrophages;
b) determining the copy number, amount, and/or activity of the at least one target in a control; and
c) comparing the copy number, amount, and/or activity of the at least one target detected in steps a) and b);
wherein the presence of, or an increase in, the copy number, amount, and/or activity of, the at least one target listed in Table 1 and/or the absence of, or a decrease in, the copy number, amount, and/or activity of, the at least one target listed in Table 2, in the monocytes and/or macrophages relative to the control copy number, amount, and/or activity of the at least one target indicates that the monocytes and/or macrophages can increase the inflammatory phenotype thereof by modulating the at least one target.

81. The method of claim 80, further comprising contacting the cells with, recommending, prescribing, or administering an agent that modulates the at least one target listed in Table 1 and/or Table 2.

82. The method of claim 80, further comprising contacting the cells with, recommending, prescribing, or administering cancer therapy other than an agent that modulates the one or more targets listed in Table 1 and/or Table 2 if the subject is determined not to benefit from increasing an inflammatory phenotype by modulating the one or more targets.

83. The method of claim 81 or 82, further comprising contacting the cells with and/or administering at least one additional agent that increases an immune response

84. The method of claim 83, wherein the additional agent is selected from the group consisting of targeted therapy, chemotherapy, radiation therapy, and/or hormonal therapy.

85. The method of any one of claims 80-84, wherein the control is from a member of the same species to which the subject belongs.

86. The method of any one of claims 80-85, wherein the control is a sample comprising cells.

87. The method of any one of claims 80-86, wherein the subject is afflicted with a cancer.

88. The method of any one of claims 80-87, wherein the control is a cancer sample from the subject.

89. The method of any one of claims 80-87, wherein the control is a non-cancer sample from the subject.

90. A method of identifying monocytes and/or macrophages that can decrease an inflammatory phenotype thereof by modulating at least one target comprising:
a) determining the copy number, amount, and/or activity of at least one target listed in Table 1 and/or Table 2 from the monocytes and/or macrophages;
b) determining the copy number, amount, and/or activity of the at least one target in a control; and
c) comparing the copy number, amount, and/or activity of the at least one target detected in steps a) and b);
wherein the absence of, or a decrease in, the copy number, amount, and/or activity of, the at least one target listed in Table 1 and/or the presence of, or an increase in, the copy number, amount, and/or activity of, the at least one target listed in Table 2, in the monocytes and/or macrophages relative to the control copy number, amount, and/or activity of the at least one target indicates that the monocytes and/or macrophages that can decrease the inflammatory phenotype thereof by modulating the at least one target.

91. The method of claim 90, further comprising contacting the monocytes and/or macrophages with, recommending, prescribing, or administering an agent or agents that modulate the one or more targets listed in Table 1 and/or Table 2.

92. The method of claim 91, further comprising contacting the monocytes and/or macrophages with, recommending, prescribing, or administering cancer therapy other than an agent or agents that modulate the one or more targets listed in Table 1 and/or Table 2 if the subject is determined not to benefit from decreasing an inflammatory phenotype by modulating the at least one target.

93. The method of claim 91 or 92, further comprising contacting the monocytes and/or macrophages with and/or administering at least one additional agent that decreases an immune response.

94. The method of any one of claims 90-93, wherein the control is from a member of the same species to which the subject belongs.

95. The method of any one of claims 90-94, wherein the control is a sample comprising cells.

96. The method of any one of claims 90-95, wherein the subject is afflicted with a cancer.

97. The method of any one of claims 90-96, wherein the control is a cancer sample from the subject.

98. The method of any one of claims 90-96, wherein the control is a non-cancer sample from the subject.

99. A method for predicting the clinical outcome of a subject afflicted with a cancer, the method comprising:
a) determining the copy number, amount, and/or activity of at least one target listed in Table 1 and/or Table 2 from monocytes and/or macrophages from the subject;
b) determining the copy number, amount, and/or activity of the at least one target from a control having a poor clinical outcome; and
c) comparing the copy number, amount, and/or activity of the at least one target in the subject sample and in the sample from the control subject;
wherein the presence of, or an increase in, the copy number, amount, and/or activity of, the at least one target listed in Table 1 and/or the absence of, or a decrease in, the copy number, amount, and/or activity of, the at least one target listed in Table 2, from the monocytes and/or macrophages from the subject as compared to the copy number, amount and/or activity in the control, indicates that the subject does not have a poor clinical outcome.

100. A method for monitoring the inflammatory phenotype of monocytes and/or macrophages in a subject, the method comprising:
a) detecting in a first subject sample at a first point in time the copy number, amount, and/or or activity of at least one target listed in Table 1 and/or Table 2 from monocytes and/or macrophages from the subject;
b) repeating step a) using a subsequent sample comprising monocytes and/or macrophages obtained at a subsequent point in time; and
c) comparing the amount or activity of at least one target listed in Table 1 and/or Table 2 detected in steps a) and b),
wherein the absence of, or a decrease in, the copy number, amount, and/or activity of, the at least one target listed in Table 1 and/or the presence of, or an increase in, the copy number, amount, and/or activity of, the at least one target listed in Table 2, from the monocytes and/or macrophages from the subsequent sample as compared to the copy number, amount and/or activity from the monocytes and/or macrophages from the first sample indicates that the subject's monocytes and/or macrophages have an upregulated inflammatory phenotype; or
wherein the presence of, or an increase in, the copy number, amount, and/or activity of, the at least one target listed in Table 1 and/or the absence of, or a decrease in, the copy number, amount, and/or activity of, the at least one target listed in Table 2, from the monocytes and/or macrophages from the subsequent sample as compared to the copy number, amount and/or activity from the monocytes and/or macrophages from the first samples indicates that the subject's monocytes and/or macrophages have a downregulated inflammatory phenotype.

101. The method of claim 100, wherein the first and/or at least one subsequent sample comprises monocytes and/or macrophages that are cultured in vitro.

102. The method of claim 100, wherein the first and/or at least one subsequent sample comprises monocytes and/or macrophages that are not cultured in vitro.

103. The method of any one of claims 100-102, wherein the first and/or at least one subsequent sample is a portion of a single sample or pooled samples obtained from the subject.

104. The method of any one of claims 100-103, wherein the sample comprises blood, serum, peritumoral tissue, and/or intratumoral tissue obtained from the subject.

105. A method of assessing the efficacy of an agent for increasing an inflammatory phenotype of monocytes and/or macrophages in a subject, comprising:
a) detecting in a subject sample comprising monocytes and/or macrophages at a first point in time i) the copy number, amount, and/or or activity of at least one target listed in Table 1 and/or Table 2 in or on the monocytes and/or macrophages and/or ii) an inflammatory phenotype of the monocytes and/or macrophages;
b) repeating step a) during at least one subsequent point in time after the monocytes and/or macrophages are contacted with the agent; and
c) comparing the value of i) and/or ii) detected in steps a) and b), wherein the absence of, or a decrease in, the copy number, amount, and/or activity of, the at least one target listed in Table 1 and/or the presence of, or an increase in, the copy number, amount, and/or activity of, the at least one target listed in Table 2, and/or an increase in ii) in the subsequent sample as compared to the copy number, amount, and/or activity in the sample at the first point in time, indicates that the agent increases the inflammatory phenotype of monocytes and/or macrophages in the subject.

106. The method of claim 105, wherein the monocytes and/or macrophages contacted with the agent are comprised within a population of cells and the agent increases the number of Type 1 and/or M1 macrophages in the population of cells.

107. The method of claim 105 or 106, wherein the monocytes and/or macrophages contacted with the agent are comprised within a population of cells and the agent decreases the number of Type 2 and/or M2 macrophages in the population of cells.

108. A method of assessing the efficacy of an agent for decreasing an inflammatory phenotype of monocytes and/or macrophages, comprising:
a) detecting in a subject sample comprising monocytes and/or macrophages at a first point in time i) the copy number, amount, and/or or activity of at least one target listed in Table 1 and/or Table 2 in or on the monocytes and/or macrophages and/or ii) an inflammatory phenotype of the monocytes and/or macrophages;
b) repeating step a) during at least one subsequent point in time after the monocytes and/or macrophages are contacted with the agent; and
c) comparing the value of i) and/or ii) detected in steps a) and b), wherein the presence of, or an increase in, the copy number, amount, and/or activity of, the at least one target listed in Table 1 and/or the absence of, or a decrease in, the copy number, amount, and/or activity of, the at least one target listed in Table 2, and/or a decrease in ii) in the subsequent sample as compared to the copy number, amount, and/or activity in the sample at the first point in time, indicates that the agent decreases the inflammatory phenotype of monocytes and/or macrophages in the subject.

109. The method of claim 108, wherein the monocytes and/or macrophages contacted with the agent are comprised within a population of cells and the agent selectively decreases the number of Type 1 and/or M1 macrophages in the population of cells.

110. The method of claim 108 or 109, wherein the monocytes and/or macrophages contacted with the agent are comprised within a population of cells and the agent selectively increases the number of Type 2 and/or M2 macrophages in the population of cells.

111. The method of any one of claims 105-110, wherein the monocytes and/or macrophages are contacted in vitro or ex vivo.

112. The method of claim 111, wherein the monocytes and/or macrophages are primary monocytes and/or primary macrophages.

113. The method of claim 111 or 112, wherein the monocytes and/or macrophages are purified and/or cultured prior to contact with the agent.

114. The method of any one of claims 105-110, wherein the monocytes and/or macrophages are contacted in vivo.

115. The method of claim 114, wherein the monocytes and/or macrophages are contacted in vivo by systemic, peritumoral, or intratumoral administration of the agent.

116. The method of claim 114 or 115, wherein the monocytes and/or macrophages are contacted in a tissue microenvironment.

117. The method of any one of claims 105-116, further comprising contacting the monocytes and/or macrophages with at least one immunotherapeutic agent that modulates the inflammatory phenotype, optionally wherein the immunotherapeutic agent comprises an immune checkpoint inhibitor, immune-stimulatory agonist, inflammatory agent, cells, a cancer vaccine, and/or a virus.

118. The method of any one of claims 105-117, wherein the subject is a mammal.

119. The method of claim 118, wherein the mammal is a non-human animal model or a human.

120. A method of assessing the efficacy of an agent for treating a cancer in a subject, comprising:
a) detecting in a subject sample comprising monocytes and/or macrophages at a first point in time i) the copy number, amount, and/or or activity of at least one target listed in Table 1 and/or Table 2 in or on monocytes and/or macrophages and/or ii) an inflammatory phenotype of the monocytes and/or macrophages;
b) repeating step a) during at least one subsequent point in time after administration of the agent; and
c) comparing the value of i) and/or ii) detected in steps a) and b), wherein the absence of, or a decrease in, the copy number, amount, and/or activity of, the at least one target listed in Table 1 and/or the presence of, or an increase in, the copy number, amount, and/or activity of, the at least one target listed in Table 2, and/or an increase in ii) in or on the monocytes and/or macrophages of the subject sample at the subsequent point in time as compared to the copy number, amount, and/or activity in or on the monocytes and/or macrophages of the subject sample at the first point in time, indicates that the agent treats the cancer in the subject.

121. The method of claim 120, wherein between the first point in time and the subsequent point in time, the subject has undergone treatment, completed treatment, and/or is in remission for the cancer.

122. The method of claim 120 or 121, wherein the first and/or at least one subsequent sample is selected from the group consisting of ex vivo and in vivo samples.

123. The method of any one of claims 120-122, wherein the first and/or at least one subsequent sample is obtained from a non-human animal model of the cancer.

124. The method of any one of claims 120-123, wherein the first and/or at least one subsequent sample is a portion of a single sample or pooled samples obtained from the subject.

125. The method of any one of claims 120-124, wherein the sample comprises cells, serum, peritumoral tissue, and/or intratumoral tissue obtained from the subject.

126. A method for screening for agents that sensitize cancer cells to cytotoxic T cell-mediated killing and/or immune checkpoint therapy comprising
a) contacting cancer cells with cytotoxic T cells and/or immune checkpoint therapy in the presence of monocytes and/or macrophages contacted with i) at least one agent that decreases the copy number, amount, and/or activity of at least one target listed in Table 1 and/or ii) at least one agent that increases the copy number, amount, and/or activity of the at least one target listed in Table 2;
b) contacting cancer cells with cytotoxic T cells and/or immune checkpoint therapy in the presence of control monocytes and/or macrophages that are not contacted with the at least one agent or agents; and
c) identifying agents that sensitize cancer cells to cytotoxic T cell-mediated killing and/or immune checkpoint therapy by identifying agents that increase cytotoxic T cell-mediated killing and/or immune checkpoint therapy efficacy in a) compared to b).

127. A method for screening for agents that sensitize cancer cells to cytotoxic T cell-mediated killing and/or immune checkpoint therapy comprising
a) contacting cancer cells with cytotoxic T cells and/or immune checkpoint therapy in the presence of monocytes and/or macrophages engineered to decrease the copy number, amount, and/or activity of at least one target listed in Table 1 and/or ii) engineered to increase the copy number, amount, and/or activity of the at least one target listed in Table 2;
b) contacting cancer cells with cytotoxic T cells and/or immune checkpoint therapy in the presence of control monocytes and/or macrophages; and
c) identifying agents that sensitize cancer cells to cytotoxic T cell-mediated killing and/or immune checkpoint therapy by identifying agents that increase cytotoxic T cell-mediated killing and/or immune checkpoint therapy efficacy in a) compared to b).

128. The method of claim 126 or 127, wherein the step of contacting occurs in vivo, ex vivo, or in vitro.

129. The method of any one of claims 120-128, further comprising determining a reduction in i) the number of proliferating cells in the cancer and/or ii) a reduction in the volume or size of a tumor comprising the cancer cells.

130. The method of any one of claims 120-129, further comprising determining i) an increased number of CD8+ T cells and/or ii) an increased number of Type 1 and/or M1 macrophages infiltrating a tumor comprising the cancer cells.

131. The method of any one of claims 120-130, further comprising determining responsiveness to the agent that modulates the at least one target listed in Table 1 and/or Table 2 measured by at least one criterion selected from the group consisting of clinical benefit rate, survival until mortality, pathological complete response, semi-quantitative measures of pathologic response, clinical complete remission, clinical partial remission, clinical stable disease, recurrence-free survival, metastasis free survival, disease free survival, circulating tumor cell decrease, circulating marker response, and RECIST criteria.

132. The method of any one of claims 120-131, further comprising contacting the cancer cells with at least one additional cancer therapeutic agent or regimen.

133. The method or composition of any one of claims 1-132 wherein the agent or agents further comprise a lipid or lipidoid.

134. The method or composition of claim 133, wherein the lipidoid is of Formula (VI): [chemical structure]
wherein:
p is an integer between 1 and 3, inclusive;
m is an integer between 1 and 3, inclusive;
R_{A} is hydrogen; substituted or unsubstituted, cyclic or acyclic, branched or unbranched C₁₋₂₀ aliphatic; substituted or unsubstituted, cyclic or acyclic, branched or unbranched C₁₋₂₀ heteroaliphatic; substituted or unsubstituted aryl; substituted or unsubstituted heteroaryl; [chemical structure]
R_{F} is hydrogen; substituted or unsubstituted, cyclic or acyclic, branched or unbranched C₁₋₂₀ aliphatic; substituted or unsubstituted, cyclic or acyclic, branched or unbranched C₁₋₂₀ heteroaliphatic; substituted or unsubstituted aryl; substituted or unsubstituted heteroaryl; [chemical structure]
each occurrence of R₅ is independently hydrogen; substituted or unsubstituted, cyclic or acyclic, branched or unbranched C₁₋₂₀ aliphatic; substituted or unsubstituted, cyclic or acyclic, branched or unbranched C₁₋₂₀ heteroaliphatic; substituted or unsubstituted aryl; or substituted or unsubstituted heteroaryl;
wherein, at least one of R_{A}, R_{F}, R_{Y}, and R_{Z} is [chemical structure]
each occurrence of x is an integer between 1 and 10, inclusive;
each occurrence of y is an integer between 1 and 10, inclusive;
each occurrence of R_{Y} is hydrogen; substituted or unsubstituted, cyclic or acyclic, branched or unbranched C₁₋₂₀ aliphatic; substituted or unsubstituted, cyclic or acyclic, branched or unbranched C₁₋₂₀ heteroaliphatic; substituted or unsubstituted aryl; substituted or unsubstituted heteroaryl; [chemical structure]
each occurrence of R_{Z} is hydrogen; substituted or unsubstituted, cyclic or acyclic, branched or unbranched C₁₋₂₀ aliphatic; substituted or unsubstituted, cyclic or acyclic, branched or unbranched C₁₋₂₀ heteroaliphatic; substituted or unsubstituted aryl; substituted or unsubstituted heteroaryl; [chemical structure]
or a pharmaceutically acceptable salt thereof.

135. The method or composition of claim 134, wherein p is 1.

136. The method or composition of claim 134 or 135, wherein m is 1.

137. The method or composition of any one of claims 134-136, wherein each of p and m are 1.

138. The method or composition of any one of claims 134-137, wherein R_{F} is

[chemical structure]

139. The method or composition of any one of claims 134-138, wherein R_{A} is

[chemical structure]

140. The method or composition of claim 134, wherein the compound of Formula (VI) is of the formula: [chemical structure]
or a salt thereof.

141. The method or composition of any one of claims 134-140, wherein the composition is in the form a lipid nanoparticle.

142. The method or composition of claim 141, wherein the lipid nanoparticle comprises about 1.0% to about 60.0% by mole of C12-200.

143. The method or composition of claim 141 or 142, wherein the lipid nanoparticle further comprises one or more co-lipids.

144. The method or composition of claim 143, wherein each co-lipid is selected from disteroylphosphatidyl choline (DSPC), cholesterol, and DMG-PEG.

145. The method or composition of claim 144, wherein the concentration of DSPC is about 1.0% to about 20.0% by mole.

146. The method or composition of claim 144 or 145, wherein the concentration of cholesterol is about 10.0% to about 50.0% by mole.

147. The method or composition of any one of claims 144-146, wherein the concentration of DMG-PEG is about 0.1% to about 5.0% by mole.

148. The method or composition of any one of claims 136-147, wherein DSPC is present a concentration of about 1.0% to about 20.0% by mole; cholesterol is present at a concentration of about 10.0% to about 50.0% by mole; and DMG-PEG is present a concentration of about 0.1% to about 5.0% by mole.

149. The method or composition of any one of claims 1-148, wherein the agent is in a pharmaceutically acceptable formulation, optionally wherein the pharmaceutically acceptable formulation is substantially endotoxin-free and/or has less than about 1 EU/mg protein.

150. The method or composition of any one of claims 1-149, wherein the monocytes and/or macrophages having a modulated inflammatory phenotype exhibit one or more of the following:
a) modulated expression of cluster of differentiation 80 (CD80), CD86, MHCII, MHCI, interleukin 1-beta (IL-1β), IL-6, CCL3, CCL4, CXCL10, CXCL9, GM-CSF and/or tumor necrosis factor alpha (TNF-α);
b) modulated expression of CD206, CD163, CD16, CD53, VSIG4, PSGL-1 and/or IL-10;
c) modulated secretion of at least one cytokine selected from the group consisting of IL-1β, TNF-α, IL-12, IL-18, and IL-23;
d) modulated ratio of expression of IL-1β, IL-6, and/or TNF-α to expression of IL-10;
e) modulated CD8+ cytotoxic T cell activation;
f) modulated CD4+ helper T cell activity;
g) modulated NK cell activity;
h) modulated neutrophil activity;
i) modulated macrophage activity; and/or
j) modulated spindle-shaped morphology, flatness of appearance, and/or dendrite numbers, as assessed by microscopy.

151. The method or composition of any one of claims 1-150, wherein the cells and/or macrophages comprise Type 1 macrophages, M1 macrophages, Type 2 macrophages, M2 macrophages, M2c macrophages, M2d macrophages, tumor-associated macrophages (TAM), CD11b+ cells, CD14+ cells, and/or CD11b+/CD14+ cells, optionally wherein the cells and/or macrophages express or are determined to express at least one target selected from the group consisting of targets listed in Table 1 and/or Table 2.

152. The method or composition of any one of claims 1-151, wherein the at least one target listed in Table 1 is selected from the group consisting of human SIGLEC9, VSIG4, CD74, CD207, LRRC25, SELPLG, AIF1, CD84, IGSF6, CD48, CD33, LST1, TNFAIP8L2 (TIPE2), SPI1 (PU.1), LILRB2, CCR5, EVI2B, CLEC7A, TBXAS1, SIGLEC7, and DOCK2, or a fragment thereof.

153. The method or composition of any one of claims 1-152, wherein the at least one target listed in Table 2 is selected from the group consisting of human CD53, FERMT3, CD37, CXorf21, CD48, and CD84, or a fragment thereof.

154. The method or composition of any one of claims 1-153, wherein the cancer is a solid tumor that is infiltrated with macrophages, wherein the infiltrating macrophages represent at least about 5% of the mass, volume, and/or number of cells in the tumor or the tumor microenvironment, and/or wherein the cancer is selected from the group consisting of mesothelioma, kidney renal clear cell carcinoma, glioblastoma, lung adenocarcinoma, lung squamous cell carcinoma, pancreatic adenocarcinoma, breast invasive carcinoma, acute myeloid leukemia, adrenocortical carcinoma, bladder urothelial carcinoma, brain lower grade glioma, breast invasive carcinoma, cervical squamous cell carcinoma and endocervical adenocarcinoma, cholangiocarcinoma, colon adenocarcinoma, esophageal carcinoma, glioblastoma multiforme, head and neck squamous cell carcinoma, kidney chromophobe, kidney renal clear cell carcinoma, kidney renal papillary cell carcinoma, liver hepatocellular carcinoma, lymphoid neoplasm diffuse large B-cell lymphoma, mesothelioma, ovarian serous, cystadenocarcinoma, pheochromocytoma, paraganglioma, prostate adenocarcinoma, rectum adenocarcinoma, sarcoma, skin cutaneous melanoma, stomach adenocarcinoma, testicular germ cell tumors, thymoma, thyroid carcinoma, uterine carcinosarcoma, uterine corpus endometrial carcinoma, and uveal melanoma.

155. The method or composition of claim 154, wherein the macrophages comprise Type 1 macrophages, M1 macrophages, Type 2 macrophages, M2 macrophages, M2c macrophages, M2d macrophages, tumor-associated macrophages (TAM), CD11b+ cells, CD14+ cells, and/or CD11b+/CD14+ cells, optionally wherein the macrophages are TAMs and/or M2 macrophages.

156. The method or composition of claim 155, wherein the macrophages express or are determined to express one or more targets selected from the group consisting of targets listed in Table 1 and/or Table 2.

157. The method or composition of claim 156, wherein the at least one target listed in Table 1 is selected from the group consisting of human SIGLEC9, VSIG4, CD74, CD207, LRRC25, SELPLG, AIF1, CD84, IGSF6, CD48, CD33, LST1, TNFAIP8L2 (TIPE2), SPI (PU.1), LILRB2, CCR5, EVI2B, CLEC7A, TBXAS1, SIGLEC7, and DOCK2, or a fragment thereof.

158. The method or composition of claim 156 or 157, wherein the at least one target listed in Table 2 is selected from the group consisting of human CD53, FERMT3, CD37, CXorf21, CD48, and CD84, or a fragment thereof.

159. The method or composition of any one of claims 1-158, wherein the monocytes and/or macrophages are primary monocytes and/or primary macrophages.

160. The method or composition of any one of claims 1-159, wherein the monocytes and/or macrophages are comprised within a tissue microenvironment.

161. The method or composition of anyone of claims 1-160, wherein the monocytes and/or macrophages are comprised within a human tumor model or an animal model of cancer.

162. The method or composition of any one of claims 1-161, wherein the subject is a mammal.

163. The method or composition of claim 162, wherein the mammal is a human.

164. The method or composition of claim 163, wherein the human is afflicted with a cancer.
